(19) United States
(12) Patent Application Publication
(10) Pub. No.: US 2025/0297246 A1
(43) Pub. Date: Sep. 25, 2025

(54) MODIFIED PRIME EDITING GUIDE RNAS

(71) Applicant: Prime Medicine, Inc., Cambridge, MA (US)

(72) Inventors: Andrew V. Anzalone, Cambridge, MA (US); John Stiller, Allston, MA (US); David Wiley, Dedham, MA (US)

(21) Appl. No.: 18/712,922

(22) PCT Filed: Nov. 23, 2022
(86) PCT No.: PCT/US22/50874

§ 371 Date: May 23, 2024

Related U.S. Application Data
(60) Provisional application No. 63/283,076, filed on Nov. 24, 2021.
(60) Provisional application No. 63/417,857, filed on Oct. 20, 2022.

(51) Int. Cl. C12N 15/11; C12N 9/12; C12N 9/22; C12N 15/90

(52) U.S. Cl. CPC C12N 15/11; C12N 9/1276; C12N 9/226; C12N 15/907; C12Y 207/07049; C12N 2310/20

(57) ABSTRACT

Provided herein are compositions and methods related to modified prime editing guide RNAs.

### CROSS REFERENCE TO RELATED APPLICATIONS

[0001] This application is a § 371 national-stage application based on PCT/US2022/050874, filed Nov. 23, 2022, which claims the benefit of U.S. Provisional Application No. 63/283,076, filed Nov. 24, 2021, and U.S. Provisional Application No. 63/417,857, filed Oct. 20, 2022, the entire contents of each are hereby incorporated by reference.

### REFERENCE TO SEQUENCE LISTING

[0002] The instant application contains a Sequence Listing which has been submitted electronically in XML format via EFS-Web, and is hereby incorporated by reference in its entirety. Said XML copy, created on Mar. 9, 2023, is named PMB_00101_SeqList_ST26 and is 3,944,448 bytes in size is hereby incorporated by reference in its entirety.

### BACKGROUND

[0003] Prime editing is a gene editing technology that allows researchers to make nucleotide substitutions, insertions, deletions, or combinations thereof in the DNA of cells. Prime editing can be used to correct disease associated gene mutations, and can be used for treating disease with a genetic component. There is a need for improved prime PEgRNAs that have desirable properties, such as the ability to facilitate prime editing with improved efficiency.

### SUMMARY

[0004] Provided herein are prime editing guide RNAs (PEgRNAs) useful in prime editing, as well as methods of using and making such PEgRNAs.

[0005] In some aspects, provided herein are prime editing guide RNA (PEgRNA) s comprising: (a) a spacer that comprises a region of complementarity to a search target sequence in a target strand of a double stranded target DNA; (b) a guide RNA (gRNA) core capable of binding to a Cas protein; (c) an extension arm comprising: (i) an editing template that comprises an intended edit compared to the double stranded target DNA, and (ii) a primer binding site (PBS) that comprises a region of complementarity to a region upstream of a nick site in a non-target strand of the double stranded target DNA; and (d) a 3′ nucleic acid motif selected from the group consisting of SEQ ID NOs 1-15.

[0006] In some aspects, also provided herein are prime editing guide RNA (PEgRNA) s comprising: (a) a spacer that comprises a region of complementarity to a search target sequence in target strand of a double stranded target DNA; (b) a guide RNA (gRNA) core capable of binding to a Cas protein; (c) an extension arm comprising: (i) an editing template that comprises an intended edit compared to the double stranded target DNA, and (ii) a primer binding site (PBS) that comprises a region of complementarity to a region upstream of a nick site in a non-target strand of the double stranded target DNA; and (d) a 3′ nucleic acid motif, wherein the 3′ nucleic acid motif comprises a sequence selected from the group consisting of: (A) a G-quadruplex or a C-quadruplex derived from a VEGF gene promoter, (B) a pseudoknot derived from a potato roll leaf virus (PLRV), (C) a MS2 protein binding sequence, (D) a Moloney Murine leukemia virus (MMLV) reverse transcriptase recruitment sequence, or a Moloney Murine leukemia virus (MMLV) replication recognition sequence.

[0007] In some embodiments, 3′ nucleic acid motif is the G-quadruplex or the C-quadruplex derived from a VEGF gene promoter (e.g., wherein the G-quadruplex comprises SEQ ID NO: 10 and/or the C-quadruplex comprises SEQ ID NO: 11). In some embodiments, the 3′ nucleic acid motif is the pseudoknot derived from a potato roll leaf virus (PLRV) (e.g., wherein the pseudoknot comprises SEQ ID NO: 4). In some embodiments, the 3′ nucleic acid motif comprises the MS2 protein binding sequence (e.g., wherein the MS2 protein binding sequence if SEQ ID NO: 9). In some embodiments, the 3′ nucleic acid motif comprises the MMLV reverse transcriptase recruitment sequence (e.g., the MMLV reverse transcriptase recruitment sequence comprises SEQ ID NO: 8). In some embodiments, the 3′ nucleic acid motif comprises MMLV replication recognition sequence.

[0008] In some embodiments, the MMLV replication recognition sequence comprises a sequence selected from the group consisting of SEQ ID NO:s 12-15. In some embodiments, the 3′ nucleic acid motif comprises SEQ ID NO: 1, 2, 3, 5, 6, or 7.

[0009] As provided herein, the PEgRNA comprises, in 5′ to 3′ order, the spacer, the gRNA core, the editing template, the PBS, and the 3′ nucleic acid motif. In some embodiments, the PEgRNA further comprises a linker immediately 5′ of the 3′ nucleic acid motif. The linker may be 2 to 12 nucleotides in length, such as 8 nucleotides in length. In some embodiments, the linker does not form a secondary structure. In some embodiments, the linker does not have perfect complementarity with the PBS sequence, editing template, the scaffold, and/or the extension arm. In some embodiments, the linker has no more than 90%, no more than 85%, no more than 80%, no more than 75%, no more than 70%, no more than 65%, no more than 60%, no more than 55%, no more than 50%, no more than 45%, no more than 40%, no more than 35%, no more than 30%, no more than 25%, no more than 20%, or no more than 15% complementarity to the extension arm.

[0010] In some aspects, provided herein are prime editing guide RNA (PEgRNA) comprising: (a) a spacer that comprises a region of complementarity to a search target sequence in target strand of a double stranded target DNA; (b) an extension arm comprising: (i) an editing template that comprises an intended edit compared to the double stranded target DNA, and (ii) a primer binding site (PBS) that comprises a region of complementarity to a region upstream of a nick site in a non-target strand of the double stranded target DNA; and (c) a guide RNA (gRNA) core comprising at least 80% identity to SEQ ID NO: 16 and containing one or more modifications relative to SEQ ID NO: 16, the one or more modifications comprising: (A) a first insertion between nucleotides 12 and 13 and a second insertion between nucleotides 16 and 17, wherein the first insertion is the reverse complement of the second insertion; (B) a first insertion between nucleotides 52 and 53 and a second insertion between nucleotides 56 and 57, wherein the first insertion is the reverse complement of the second insertion; (C) complementary substitutions of nucleotides 2 and 29, 3 and 28, 4 and 27, 51 and 58, or combinations thereof; (D) replacement of nucleotides 11-12 with a replacement sequence 1 and replacement of nucleotides 17-18 with a replacement sequence 2, wherein the replacement sequences 1 is at least 3 nucleotides in length and wherein the replacement sequence 2 is the reverse compliment of replacement sequence 1; (E) a T to G or T to C substitution at nucleotide 5 and a complementary substitution at nucleotide 26; or (F) any combination thereof.

[0011] In some embodiments, the gRNA core comprises the first insertion between nucleotides 12 and 13 and the second insertion between nucleotides 16 and 17. The insertion may be 1 to 6 nucleotides in length. In some embodiments, the first insertion comprises the sequence UGCUG. In some embodiments, the second insertion comprises the sequence CAGCA.

[0012] In some embodiments, the one or more modification comprises a replacement of nucleotides 49-52 with a replacement sequence 1 and replacement of nucleotides 57-60 with replacement sequence 2, wherein the replacement sequence 2 is the reverse complement of the replacement sequence 1; optionally wherein the replacement sequence 1 is 7-11 nucleotides in length; optionally wherein the replacement sequence 1 is 7-9 nucleotides in length; optionally wherein the replacement sequence 1 comprises GCGUCUC, GCGUCCC, GCGUCCA, GCGUGUGA, GCGUAGCC, GCGUGCAGA, GCGUACCCU, or GCGUUGUCG.

[0013] In some embodiments, the first insertion is 1 to 3 nucleotides in length, for example, first insertion may comprise a sequence selected from the group consisting of C, CC, CA, CG, A, AC, AA, AG, CCC, CCAC, CCAAC, and CCACAC.

[0014] In some embodiments, the gRNA core comprises the first insertion between nucleotides 52 and 53 and the second insertion between nucleotides 56 and 57. The first insertion may be 1 to 8 nucleotides in length. In some embodiments, the gRNA core comprises the complementary substitutions of nucleotides 2 and 29, 3 and 28, 4 and 27, 11 and 18, 12 and 17, 51 and 58, or combinations thereof. In some embodiments, the gRNA core comprises a U to A substitution at nucleotide 2. In some embodiments, the gRNA core comprises a U to A substitution at nucleotide 3. In some embodiments, the gRNA core comprises a U to A substitution at nucleotide 4. In some embodiments, the gRNA core comprises a U to G substitution at nucleotide 51 and optionally an A to C substitution at nucleotide 58.

[0015] In some embodiments, the gRNA core comprises the replacement of nucleotides 11-12 with the replacement sequence 1 and the replacement of nucleotides 17-18 with the replacement sequence 2.

[0016] In some embodiments, the replacement sequence 1 is 3 to 5 nucleotides in length, for example, the replacement sequence 1 may comprise a sequence selected from the group consisting of CAGC, CCGC, GGAC, UGC, UCC, GAGGC, AGC, GGC, CGCA, GCACA, GGUC, and GGG. In some embodiments, the gRNA core further comprises a U to A substitution at nucleotide 5 and an A to U substitution at nucleotide 26. In some embodiments, the gRNA core comprises complementary substitutions at nucleotides 52 and 57. In some embodiments, the gRNA core comprises a U to G substitution at nucleotide 52 and an A to C substitution at nucleotide 57. In some embodiments, the gRNA core comprises a U to C substitution at nucleotide 52 and an A to G substitution at nucleotide 57. In some embodiments, the gRNA core comprises complementary substitutions at nucleotides 49 and 60. In some embodiments, the gRNA core comprises an A to G substitution at nucleotide 49 and a U to C substitution at nucleotide 60.

[0017] In some aspects, provided herein are prime editing guide RNA (PEgRNA) comprising: (a) a spacer that comprises a region of complementarity to a search target sequence in target strand of a double stranded target DNA; (b) an extension arm comprising: (i) an editing template that comprises an intended edit compared to the double stranded target DNA, and (ii) a primer binding site (PBS) that comprises a region of complementarity to a region upstream of a nick site in a non-target strand of the double stranded target DNA; and (c) a guide RNA (gRNA) core comprising at least 80% identity to SEQ ID NO: 16 and containing one or more modifications relative to SEQ ID NO: 16, the one or more modifications comprising: (A) a U to A substitution at nucleotide 5 and an A to U substitution at nucleotide 26, and (B) a modification selected from the group consisting of: a. a first insertion between nucleotides 12 and 13 having the sequence of UGCUG and a second insertion between nucleotides 16 and 17 having the sequence of CAGCA; b. a first insertion between nucleotides 12 and 13 having the sequence of UGCUG and a second insertion between nucleotides 16 and 17 having the sequence of CAGCA, an A to G substitution at nucleotide 49, a U to C substitution at nucleotide 60, a U to G substitution at nucleotide 51, and an A to C substitution at nucleotide 58; c. a replacement of nucleotides 11-12 with replacement sequence 1 and a replacement of nucleotides 17-18 with replacement sequence 2, wherein the replacement sequence 1 comprises GGG and wherein the replacement sequence 2 comprises UCC; d. a replacement of nucleotides 11-12 with replacement sequence 1 and a replacement of nucleotides 17-18 with replacement sequence 2, wherein the replacement sequence 1 comprises GGG and wherein the replacement sequence 2 comprises UCC, an A to G substitution at nucleotide 49, a U to C substitution at nucleotide 60, a U to G substitution at nucleotide 51, and an A to C substitution at nucleotide 58; or e. a replacement of nucleotides 11-12 with replacement sequence 1 and a replacement of nucleotides 17-18 with replacement sequence 2, wherein the replacement sequence 1 and replacement sequence 2 comprises sequences CAGC and GCUG, CCGC and GCGG, GGAC and GUCC, GC and GC, CC and GG, GAGGC and GUCUC, AGC and GCU, GGC and GCC, CGCA and UGCG, GCACA and UGUGC, or GGUC and GGCC.

[0018] In some embodiments, the gRNA core comprises nucleotides 62-76 of SEQ ID NO: 16.

[0019] In some embodiments, the one or more modifications comprises a replacement of nucleotides 49-52 with a replacement sequence 1 and replacement of nucleotides 57-60 with replacement sequence 2, wherein the replacement sequence 2 is the reverse complement of the replacement sequence 1; optionally wherein the replacement sequence 1 is 7-11 nucleotides in length; optionally wherein the replacement sequence 1 is 7-9 nucleotides in length; optionally wherein the replacement sequence 1 comprises GCGUCUC, GCGUCCC, GCGUCCA, GCGUGUGA, GCGUAGCC, GCGUGCAGA, GCGUACCCU, or GCGUUGUCG.

[0020] In some aspects, provided herein are prime editing guide RNAs (PEgRNAs) comprising: a spacer that comprises a region of complementarity to a search target sequence in target strand of a double stranded target DNA; an extension arm comprising: an editing template that comprises an intended edit compared to the double stranded target DNA, and a primer binding site (PBS) that comprises a region of complementarity to a region upstream of a nick site in a non-target strand of the double stranded target DNA; and a guide RNA (gRNA) core comprising a sequence selected from the group consisting of SEQ ID NO:s 17-61, 3860-4253, 4255-4349, 4351-4359, and 4452.

[0021] In some embodiments, the gRNA core comprises a sequence selected from the group consisting of SEQ ID NOs: 4294, 4319, 4322, 4286, 4290, 4346, 4271, 4264, 4317, 4330, 4312, 4356, 4280, and 4452. In some embodiments, the gRNA core comprises SEQ ID NO: 4354.

[0022] In some embodiments, the PEgRNA comprises a 3′ nucleic acid motif selected from the group consisting of SEQ ID NOs 1-15, such as SEQ ID NO: 1, 2, 3, 5, 6, or 7. In some embodiments, the PEgRNA comprises a 3′ nucleic acid motif, wherein the 3′ nucleic acid motif comprises a sequence selected from the group consisting of: a G-quadruplex or a C-quadruplex derived from a VEGF gene promoter, a pseudoknot derived from a potato roll leaf virus (PLRV), a MS2 protein binding sequence, a Moloney Murine leukemia virus (MMLV) reverse transcriptase recruitment sequence, or a Moloney Murine leukemia virus (MMLV) replication recognition sequence.

[0023] In some embodiments, the selected 3′ nucleic acid motif is the G-quadruplex or the C-quadruplex derived from a VEGF gene promoter. The G-quadruplex may comprise SEQ ID NO: 10. The C-quadruplex may comprise SEQ ID NO: 11. In some embodiments, the selected 3′ nucleic acid motif is the pseudoknot derived from a potato roll leaf virus (PLRV). The pseudoknot may comprise SEQ ID NO: 4. In some embodiments, the 3′ nucleic acid motif comprises the MS2 protein binding sequence, such as SEQ ID NO: 9. In some embodiments, the 3′ nucleic acid motif comprises the MMLV reverse transcriptase recruitment sequence, such as the MMLV reverse transcriptase recruitment sequence comprises SEQ ID NO: 8. In some embodiments, the selected 3′ nucleic acid motif comprises MMLV replication recognition sequence, such as a sequence selected from the group consisting of SEQ ID NO:s 12-15.

[0024] In some embodiments, the PEgRNA comprises, in 5′ to 3′ order, the spacer, the gRNA core, the editing template, the PBS, and the 3′ nucleic acid motif. In some embodiments, the PEgRNA further comprises a linker immediately 5′ of the 3′ nucleic acid motif. The linker is 2 to 12 nucleotides in length, such 8 nucleotides in length. In some embodiments, the linker does not form a secondary structure. In some embodiments, the linker does not have perfect complementarity with the PBS sequence, the editing template, the scaffold, and/or the extension arm.

[0025] The linker may comprise no more than 90%, no more than 85%, no more than 80%, no more than 75%, no more than 70%, no more than 65%, no more than 60%, no more than 55%, no more than 50%, no more than 45%, no more than 40%, no more than 35%, no more than 30%, no more than 25%, no more than 20%, or no more than 15% complementarity to the extension arm.

[0026] In some aspects, provided herein are prime editing guide RNAs (PEgRNAs) comprising: (a) a spacer that comprises a region of complementarity to a search target sequence in target strand of a double stranded target DNA; (b) a guide RNA (gRNA) core capable of binding to a Cas protein; (c) an extension arm comprising: (i) an editing template that comprises an intended edit compared to the double stranded target DNA; and (ii) a primer binding site (PBS) that comprises a region of complementarity to a region upstream of a nick site in a non-target strand of the double stranded target DNA, and (d) a tag sequence that is the reverse complement of a sequence within the editing template.

[0027] In any embodiment disclosed herein the tag sequence may be from 4 nucleotides to 22 nucleotides in length, such as from 4 nucleotides to 10 nucleotides in length, from 4 nucleotides to 9 nucleotides in length, from 6 nucleotides to 8 nucleotides in length, 6 nucleotides in length, or 8 nucleotides in length.

[0028] In some embodiments, the tag sequence does not have perfect complementarity with the PBS, the gRNA core, and/or the spacer. In some embodiments, the PEgRNA comprises, in 5′ to 3′ order, the spacer, the gRNA core, the editing template, the PBS, and the tag sequence. In some embodiments, the PEgRNA comprises, in 5′ to 3′ order, the editing template, the PBS, the tag sequence, the spacer, and the gRNA core.

[0029] In some embodiments, the PEgRNA comprises a linker between the PBS and the tag sequence. The linker may be from 2 to 12 nucleotides in length, such as from 4 nucleotides to 8 nucleotides in length, 4 to 6 nucleotides in length, 8 nucleotides in length, 6 nucleotides in length, or 4 nucleotides in length.

[0030] In some embodiments, the linker does not have perfect complementarity with the PBS, the gRNA core, and/or the spacer. In some embodiments, the linker does not form a secondary structure.

[0031] In some embodiments, the gRNA core comprises a sequence selected from the group consisting of SEQ ID NOs: 16-60, 3860-4359, and 4452.

[0032] Also provided herein are prime editing system comprising: (a) a PEgRNA disclosed herein or one or more polynucleotides encoding the PEgRNAs disclosed herein; and (b) a prime editor comprising a Cas protein and a DNA polymerase or one or more polynucleotides encoding the prime editor. In some embodiments, Cas protein has a nickase activity. The Cas protein is a Cas9 may comprise a mutation in an HNH domain.

[0033] In some embodiments, the Cas9 comprises at least 80%, 85%, 90%, 95%, 96%, 97%, 98%, 99%, or 100% identity to compared to SEQ ID NO: 4442. The Cas protein may be a Cas12a, Cas12b, Cas12c, Cas12d, Cas12e, Cas14a, Cas14b, Cas14c, Cas14d, Cas14c, Cas14f, Cas14g, Cas14h, Cas14u, or Casφ.

[0034] In some embodiments, the DNA polymerase is a reverse transcriptase, such as a retrovirus reverse transcriptase. In some embodiments, the reverse transcriptase comprises at least 80%, 85%, 90%, 95%, 96%, 97%, 98%, 99%, or 100% identity to SEQ ID NO: 4444. In some embodiments, the Cas protein and the DNA polymerase are fused or linked in a fusion protein. In some embodiments, the fusion protein comprises the sequence of SEQ ID NO: 4440.

[0035] In some embodiments, the one or more polynucleotides comprise (a) a first sequence encoding an N-terminal portion of the Cas protein and an intein-N and (b) a second sequence encoding an intein-C, a C-terminal portion of the Cas protein and the DNA polymerase.

[0036] In some embodiments, the prime editing system comprises one or more vectors that comprise the one or more polynucleotide encoding the PEgRNA and the one or more polynucleotides encoding the prime editor. The one or more vectors may be, for example, AAV vectors. The one or more polynucleotides may be mRNA.

[0037] Also provided herein are lipid nanoparticle (LNP) or ribonucleoprotein (RNP) comprising the prime editing system disclosed herein.

[0038] In some aspects, provided herein are methods for editing a double stranded target DNA, the method comprising contacting the target DNA with (a) a PEgRNA disclosed herein and a prime editor comprising a Cas9 nickase and a reverse transcriptase, (b) a prime editing system of disclosed herein, or (c) the LNP or RNP disclosed herein. Target DNA disclosed herein may be in a cell.

[0039] In some embodiments, the editing efficiency for editing a double stranded target DNA is at least 1.1-fold, 1.2-fold, 1.3-fold, 1.4-fold, 1.5-fold, 1.6-fold, 1.7-fold, 1.8-fold, 1.9-fold, 2-fold, 2.1-fold, 2.2-fold, 2.3-fold, 2.4-fold, or 2.5-fold higher compared to the editing efficiency with a control PEgRNA having the same spacer and extension arm, wherein the control PEgRNA contains a gRNA core having the sequence of SEQ ID NO: 16 and does not contain a 3′ nucleic acid motif or a tag.

[0040] In some embodiments, the gRNA core comprises a sequence selected from the group consisting of SEQ ID NOs: 4352, 3860, 3862, 3865, 3908, 3915, 3982, 3991, 4035, 4261, 4262, 4263, 4264, 4265, 4266, 4268, 4277, 4278, 4280, 4283, 4284, 4285, 4286, 4269, 4287, 4288, 4289, 4290, 4291, 4270, 4271, 4272, 4274, 4275, 4276, 4292, 4301, 4302, 4304, 4305, 4306, 4309, 4293, 4311, 4312, 4313, 4315, 4316, 4317, 4319, 4320, 4294, 4321, 4322, 4323, 4295, 4296, 4297, 4299, 4324, 4333, 4334, 4338, 4339, 4341, 4342, 4343, 4345, 4346, 4348, 4349, 4328, 4329, 4330, and 4332.

[0041] In certain aspects, PEgRNAs provided herein comprise i) a spacer that comprises a region of complementarity to a search target sequence in target strand of a double stranded target DNA; ii) a guide RNA (gRNA) core comprising a direct repeat, a first stem loop, and a second stem loop; iii) an editing template that comprises an intended edit compared to the double stranded target DNA; and iv) a primer binding site (PBS) that comprises a region of complementarity to a region upstream of a nick site in a non-target strand of the double stranded target DNA, wherein the PEgRNA comprises one or more nucleic acid moieties at its 3′ end. In some embodiments, the PEgRNAs comprise, in 5′ to 3′ order, the spacer, the gRNA core, the editing template, and the PBS.

[0042] In some embodiments, the one or more (e.g., two or more, three or more, four or more, or five or more) nucleic acid moieties comprise a hairpin (e.g., hairpin comprising a region of self-complementarity, optionally wherein the region of self-complementary comprises 2, 3, 4, 5, 6, 7, 8, 9 or 10 contiguous complementary basepairs), a quadruplex (e.g., a G-quadruplex or a C-quadruplex, optionally wherein the G-quadruplex or the C-quadruplex is derived from a VEGF gene promoter), a tRNA sequence (e.g., a tRNA sequence, optionally wherein the tRNA sequence is a tRNA (Proline) sequence), an aptamer (e.g., an aptamer derived from a viral protein-binding sequence, optionally wherein the aptamer comprises a viral reverse transcriptase recruitment sequence, optionally wherein the aptamer comprises a MS2 protein binding sequence or a Moloney Murine leukemia (MMLV) reverse transcriptase recruitment sequence), and/or a pseudoknot (e.g., pseudoknot is derived form a potato roll leaf virus (PLRV), or any combination thereof. In some embodiments, the one or more nucleic acid moieties comprise a structure derived form a replication recognition sequence of a retrovirus, optionally wherein the retrovirus is a Moloney Murine leukemia (MMLV). For example, the one or more nucleic acid moieties may comprise a configuration as set forth in Table 4. In some embodiments, the one or more nucleic acid moieties comprise a nucleic acid sequence selected from SEQ ID NOs 1-15.

[0043] In certain embodiments, the PEgRNAs provided herein comprise a linker immediately 5′ of the one or more nucleic acid moieties. In some embodiments, the linker is 1, 2, 3, 4, 5, 6, 7, 8, 9, 10, 11, 12, 13, 14, 15, 16 nucleotides in length. In some embodiments, the linker is 2 to 13 nucleotides in length. In some embodiments, the linker is 8 nucleotides long. In some embodiments, the linker does not form a secondary structure. In some embodiments, the linker does not have a region of complementarity to the PBS sequence. In some embodiments, the linker does not have a region of complementarity to the editing template.

[0044] In certain embodiments, the gRNA core of the PEgRNAs provided herein comprises one or more sequence modifications compared to SEQ ID NO. 16. In some embodiments, the one or more (e.g., two or more, three or more, four or more, or five or more) sequence modifications comprises a gRNA core difference set forth in Table 1. In some embodiments, the gRNA core of a PEgRNA comprises a gRNA core sequence as set forth in Table 1 or Table 2. In some embodiments, the one or more sequence modifications comprises a sequence modification in the direct repeat. For example, the direct repeat may comprise at least one flip of an A/U basepair in the lower stem of the direct repeat, optionally wherein the lower stem does not contain 2, 3, 4, or more contiguous A-U basepairs; and/or at least one flip of an A/U basepair in the direct repeat comprises a flip of the fourth A/U basepair in the lower stem of the direct repeat. An exemplary PEgRNA gRNA core structure with one flip of an A-U basepair in the lower stem of the direct repeat is shown in FIG. 12.

[0045] In some embodiments, the sequence modification in the direct repeat comprises an extension in the upper stem of the direct repeat. The extension in the upper stem of the direct repeat may be 1, 2, 3, 4, 5, 6, 7, 8, 9, 10, 11, 12, 13, 14, 15, or 16 basepairs in length. In some embodiments, the direct repeat comprises a sequence selected from SEQ ID NOs: 26-37. In some embodiments, the one or more sequence modifications comprises a modification in the second stem loop. In some embodiments, the modification in the second stem loop comprises a flip of a G/C basepair in the second stem loop. In some embodiments, the gRNA core comprises a nucleic acid sequence selected from SEQ ID NOs: 21, 22 or 25. In some embodiments, the gRNA core comprises a sequence selected from SEQ ID NOs: 16-61.

[0046] In certain aspects, PEgRNAs provided herein comprise i) a spacer that comprises a region of complementarity to a search target sequence in target strand of a double stranded target DNA; ii) a guide RNA (gRNA) core comprising a direct repeat, a first stem loop, and a second stem loop; iii) an editing template that comprises an intended edit compared to the double stranded target DNA; and iv) a primer binding site (PBS) that comprises a region of complementarity to a region upstream of a nick site in a non-target strand of the double stranded target DNA, wherein the gRNA core comprises one or more sequence modifications compared to SEQ ID NO. 16.

[0047] In some embodiments, the PEgRNAs comprise, in 5′ to 3′ order, the spacer, the gRNA core, the editing template, and the PBS. In some embodiments, the one or more (e.g., two or more, three or more, four or more, or five or more) sequence modifications comprises a gRNA core difference set forth in Table 1. In some embodiments, the gRNA core of a PEgRNA comprises a gRNA core sequence set forth in Table 1 or Table 2. In some embodiments, the one or more sequence modifications comprises a sequence modification in the direct repeat. For example, the direct repeat may comprise at least one flip of an A-U basepair in a lower stem of the direct repeat, optionally wherein the lower stem does not contain 2, 3, 4, or more contiguous A-U basepairs; and/or at least one flip of an A/U basepair in the direct repeat comprises a flip of the fourth A/U basepair in the lower stem of the direct repeat. In some embodiments, the sequence modification in the direct repeat comprises an extension in the upper stem of the direct repeat. The extension in the upper stem of the direct repeat may be from 1, 2, 3, 4, 5, 6, 7, 8, 9, 10, 11, 12, 13, 14, 15, or 16 basepairs. In some embodiments, the direct repeat comprises a sequence selected from SEQ ID NOs: 26-37. In some embodiments, the one or more sequence modifications comprises a modification in the second stem loop. In some embodiments, the modification in the second stem loop comprises a flip of a G/C basepair in the second stem loop. In some embodiments, the gRNA core comprises a nucleic acid sequence selected from SEQ ID NOs: 21, 22 or 25. In some embodiments, the gRNA core comprises a sequence selected from SEQ ID NOs: 16-61.

[0048] In certain embodiments, PEgRNAs provided herein comprise i) a spacer that comprises a region of complementarity to a search target sequence in target strand of a double stranded target DNA; ii) a guide RNA (gRNA) core comprising a direct repeat, a first stem loop, and a second stem loop; iii) an editing template that comprises an intended edit compared to the double stranded target DNA; and iv) a primer binding site (PBS) that comprises a region of complementarity to a region upstream of a nick site in a non-target strand of the double stranded target DNA, and v) a tag sequence that comprises a region of complementarity to the PBS and/or the editing template. In some embodiments, the PEgRNAs comprise, in 5′ to 3′ order, the spacer, the gRNA core, the editing template, and the PBS. In some embodiments, the PEgRNAs comprise, in 5′ to 3′ order, the editing template, the spacer, the tag sequence, the spacer, and the gRNA core.

[0049] In some embodiments, the gRNA core comprises a first gRNA core sequence comprising a 5′ half of the gRNA core and a second gRNA core sequence comprising a 3′ half of the gRNA core, and wherein the PEgRNA comprises, in 5′ to 3′ order: the spacer, the first gRNA core sequence, the editing template, the PBS, the tag sequence, and the second gRNA core sequence. In some embodiments, the spacer comprises a first spacer sequence comprising the 5′ half of the spacer and a second spacer sequence comprising the 3′ half of the spacer, wherein the tag sequence is between the first spacer sequence and the second spacer sequence. In some embodiments, the tag sequence comprises a region of complementarity to the editing template. In some embodiments, the tag sequence comprises a region of complementarity to the PBS. In some embodiments, the tag sequence comprises a region of complementarity to the editing template and does not have substantial complementarity to the PBS. In some embodiments, the tag sequence comprises a region of complementarity to the editing template and does not have complementarity to the PBS. In some embodiments, the tag sequence and the editing template each comprises a region of complementarity to each other, wherein the 3′ half of the region of complementarity in the editing template is at a position between 1, 2, 3, 4, 5, 6, 7, 8, 9, 10, 11, 12, 13, 14, 15, 16 bases 5′ of the 3′ half of the editing template, wherein region of complementarity in the tag sequence is at a 5′ portion of the tag sequence. In some embodiments, the tag sequence does not have substantial complementarity to the spacer. In some embodiments, the tag does not have complementarity to the spacer. In some embodiments, the tag sequence is 1, 2, 3, 4, 5, 6, 7, 8, 9, 10, 11, 12, 13, 14, 15, 16 nucleotides in length. In some embodiments, the tag sequence is at least 4, at least 6, at least 8 nucleotides in length. In some embodiments, the tag sequence comprises a nucleic acid sequence selected from SEQ REF NOs 62-1960. In some embodiments, the PEgRNA comprises one or more nucleic acid moieties at its 3′ half. In some embodiments, the PEgRNA comprise, in 5′ to 3′ order, the spacer, the gRNA core, the editing template, and the PBS.

[0050] In some embodiments, the one or more nucleic acid moieties comprise a hairpin (e.g., hairpin comprising a region of self-complementarity, optionally wherein the region of self-complementary comprises 2, 3, 4, 5, 6, 7, 8, 9, or 10 contiguous complementary basepairs), a quadruplex (e.g., a G-quadruplex or a C-quadruplex, optionally wherein the G-quadruplex or the C-quadruplex is derived from a VEGF gene promoter), a tRNA sequence (e.g., a tRNA sequence, optionally wherein the tRNA sequence is a tRNA (Proline) sequence), an aptamer (e.g., an aptamer derived from a viral protein-binding sequence, optionally wherein the aptamer comprises a viral reverse transcriptase recruitment sequence, optionally wherein the aptamer comprises a MS2 protein binding sequence or a Moloney Murine leukemia (MMLV) reverse transcriptase recruitment sequence), and/or a pseudoknot (e.g. pseudoknot is derived form a potato roll leaf virus (PLRV)), or any combination thereof. In some embodiments, the one or more nucleic acid moieties comprise a structure derived form a replication recognition sequence of a retrovirus, optionally wherein the retrovirus is a Moloney Murine leukemia (MMLV). For example, the one or more nucleic acid moieties may comprise a configuration as set forth in Table 3. In some embodiments, the one or more nucleic acid moieties comprise a nucleic acid sequence selected from SEQ ID NOs 1-15.

[0051] In some embodiments, the PEgRNA comprises a linker. In some embodiments, the linker is: i) immediately 5′ of the one or more nucleic acid moieties, ii) immediately 5′ of the tag sequence, iii) immediately 3′ of the tag sequence, iv) immediately 3′ of the spacer, v) immediately 5′ of the spacer, vi) immediately 3′ of the gRNA core, and/or vii) immediately 5′ of the gRNA core. In some embodiments, the linker is 1, 2, 3, 4, 5, 6, 7, 8, 9, 10, 11, 12, 13, 14, 15, 16 nucleotides in length. In some embodiments, the linker is 2 to 12 nucleotides in length. In some embodiments, the linker is 8 nucleotides long. In some embodiments, the linker does not form a secondary structure. In some embodiments, the linker does not have a region of complementarity to the PBS sequence. In some embodiments, the linker does not have a region of complementarity to the editing template. In some embodiments, the linker comprises a nucleic acid sequence selected from SEQ REF NOs 1961-3859.

[0052] In certain embodiments, the gRNA core of the PEgRNAs provided herein comprises one or more sequence modifications compared to SEQ ID NO. 16. In some embodiments, the one or more (e.g., two or more, three or more, four or more, or five or more) sequence modifications comprises a gRNA core difference set forth in Table 1. In some embodiments, the gRNA core of a PEgRNA comprises a gRNA core sequence set forth in Table 1 or Table 2. In some embodiments, the one or more sequence modifications comprises a sequence modification in the direct repeat. For example, the direct repeat may comprise at least one flip of an A-U basepair in a lower stem of the direct repeat, optionally wherein the lower stem does not contain 2, 3, 4, or more contiguous A-U basepairs; and/or at least one flip of an A/U basepair in the direct repeat comprises a flip of the fourth A/U basepair in the lower stem of the direct repeat. In some embodiments, the sequence modification in the direct repeat comprises an extension in the upper stem of the direct repeat. The extension in the upper stem of the direct repeat may be from 1, 2, 3, 4, 5, 6, 7, 8, 9, 10, 11, 12, 13, 14, 15, or 16 basepairs. In some embodiments, the direct repeat comprises a sequence selected from SEQ ID NOs: 26-37. In some embodiments, the one or more sequence modifications comprises a modification in the second stem loop. In some embodiments, the modification in the second stem loop comprises a flip of a G/C basepair in the second stem loop. In some embodiments, the gRNA core comprises a nucleic acid sequence selected from SEQ ID NOs: 21, 22 or 25. In some embodiments, the gRNA core comprises a sequence selected from SEQ ID NOs: 16-61.

[0053] In some aspects, PEgRNAs provided herein comprise in 5′ to 3′ order: i) a spacer that comprises a region of complementarity to a search target sequence in target strand of a double stranded target DNA; ii) 5′ part of a guide RNA (gRNA) core comprising a direct repeat and a first stem loop; iii) an editing template that comprises an intended edit compared to the double stranded target DNA; iv) a primer binding site (PBS) that comprises a region of complementarity to a region upstream of a nick site in a non-target strand of the double stranded target DNA; and v) a 3′ part of a gRNA core comprising a second stem loop. In some embodiments, the PEgRNA further comprises a tag sequence that comprises a region of complementarity to the PBS and/or the editing template. In some embodiments, the tag sequence is positioned 3′ of the 3′ part of a gRNA core.

[0054] In some embodiments, the tag sequence comprises a region of complementarity to the editing template. In some embodiments, the tag sequence comprises a region of complementarity to the PBS. In some embodiments, the tag sequence comprises a region of complementarity to the editing template and does not have substantial complementarity to the PBS. In some embodiments, the tag sequence comprises a region of complementarity to the editing template and does not have complementarity to the PBS. In some embodiments, the 5′ end of the tag sequence comprises a region of complementarity to a position between 1, 2, 3, 4, 5, 6, 7, 8, 9, 10, 11, 12, 13, 14, 15, 16 bases 5′ of the 3′ end of the editing template. In some embodiments, the tag sequence does not have substantial complementarity to the spacer. In some embodiments, the tag does not have complementarity to the spacer. In some embodiments, the tag sequence is 1, 2, 3, 4, 5, 6, 7, 8, 9, 10, 11, 12, 13, 14, 15, 16 nucleotides in length. The tag sequence may be at least 4, at least 6, or at least 8 nucleotides in length. In some embodiments, the tag sequence comprises a nucleic acid sequence selected from SEQ REF NOs 62-1960. In some embodiments, the PEgRNA comprises one or more nucleic acid moieties at its 3′ end. In some embodiments, the PEgRNA comprise, in 5′ to 3′ order, the spacer, the gRNA core, the editing template, and the PBS.

[0055] In some embodiments, the one or more nucleic acid moieties comprise a hairpin (e.g., hairpin comprising a region of self-complementarity, optionally wherein the region of self-complementary comprises 2, 3, 4, 5, 6, 7, 8, 9, or 10 contiguous complementary basepairs), a quadruplex (e.g., a G-quadruplex or a C-quadruplex, optionally wherein the G-quadruplex or the C-quadruplex is derived from a VEGF gene promoter), a tRNA sequence (e.g., a tRNA sequence, optionally wherein the tRNA sequence is a tRNA (Proline) sequence), an aptamer (e.g., an aptamer derived from a viral protein-binding sequence, optionally wherein the aptamer comprises a viral reverse transcriptase recruitment sequence, optionally wherein the aptamer comprises a MS2 protein binding sequence or a Moloney Murine leukemia (MMLV) reverse transcriptase recruitment sequence), and/or a pseudoknot (e.g., pseudoknot is derived form a potato roll leaf virus (PLRV)), or any combination thereof. In some embodiments, the one or more nucleic acid moieties comprise a structure derived form a replication recognition sequence of a retrovirus, optionally wherein the retrovirus is a Moloney Murine leukemia (MMLV). For example, the one or more nucleic acid moieties may comprise a configuration as set forth in Table 2. In some embodiments, the one or more nucleic acid moieties (e.g., a nucleic acid moiety at the 3′ end of the PEgRNA) comprise a nucleic acid sequence selected from SEQ ID NOs 1-15.

[0056] In some embodiments, the PEgRNA comprises a linker. In some embodiments, the linker is: i) immediately 5′ of the one or more nucleic acid moieties, ii) immediately 5′ of the tag sequence, iii) immediately 3′ of the tag sequence, iv) immediately 3′ of the spacer, v) immediately 5′ of the spacer, vi) immediately 3′ of the gRNA core, and/or vii) immediately 5′ of the gRNA core. In some embodiments, the linker is 1, 2, 3, 4, 5, 6, 7, 8, 9, 10, 11, 12, 13, 14, 15, 16 nucleotides in length. The linker may be 2-12 nucleotides in length. The linker may be 8 nucleotides in length. In some embodiments, the linker does not form a secondary structure. In some embodiments, the linker does not have a region of complementarity to the PBS sequence. In some embodiments, the linker does not have a region of complementarity to the editing template.

[0057] In some embodiments, the 5′ part of a gRNA core and the 3′ part of a guide RNA (gRNA) core comprises one or more sequence modifications compared to SEQ ID NO. 16. In some embodiments, the one or more sequence modifications comprises a gRNA core difference set forth in Table 1 or Table 2.

[0058] In some embodiments, the one or more sequence modifications comprises a sequence modification in the direct repeat. For example, the direct repeat may comprise at least one flip of an A-U basepair in a lower stem of the direct repeat, optionally wherein the lower stem does not contain 2, 3, 4, or more contiguous A-U basepairs; and/or at least one flip of an A/U basepair in the direct repeat comprises a flip of the fourth A/U basepair in the lower stem of the direct repeat. In some embodiments, the sequence modification in the direct repeat comprises an extension in the upper stem of the direct repeat. The extension in the upper stem of the direct repeat may be from 1, 2, 3, 4, 5, 6, 7, 8, 9, 10, 11, 12, 13, 14, 15, or 16 basepairs. In some embodiments, the direct repeat comprises a sequence selected from SEQ ID NOs: 26-37. In some embodiments, the one or more sequence modifications comprises a modification in the second stem loop. In some embodiments, the modification in the second stem loop comprises a flip of a G/C basepair in the second stem loop. In some embodiments, the gRNA core comprises a nucleic acid sequence selected from SEQ ID NOs: 21, 22 or 25. In some embodiments, the gRNA core comprises a sequence selected from SEQ ID NOs: 16-61. In some embodiments, the linker comprises a nucleic acid sequence selected from SEQ REF NOs 1961-3859.

[0059] In some aspects, PEgRNAs provided herein comprise: i) a first sequence comprising a spacer that comprises a region of complementarity to a search target sequence in target strand of a double stranded target DNA, and a first half of a gRNA core; and ii) a second sequence comprising a second half of the gRNA core, an editing template that comprises an intended edit compared to the double stranded target DNA; a primer binding site (PBS) that comprises a region of complementarity to a region upstream of a nick site in a non-target strand of the double stranded target DNA; and, wherein the gRNA core comprises a direct repeat, a first stem loop, and a second stem loop.

[0060] In certain aspects, PEgRNAs provided herein comprise i) a first sequence comprising an editing template that comprises an intended edit compared to the double stranded target DNA; a primer binding site (PBS) that comprises a region of complementarity to a region upstream of a nick site in a non-target strand of the double stranded target DNA; a spacer that comprises a region of complementarity to a search target sequence in target strand of a double stranded target DNA; and a first half of a gRNA core; and ii) a second sequence comprising a second half of a gRNA core, wherein the gRNA core comprises a direct repeat, a first stem loop, and a second stem loop.

[0061] In some embodiments, the first sequence is on a first RNA molecule and the second sequence is on a second RNA molecule. In some embodiments, the spacer and the first sequence and the second sequence are on the same RNA molecule. In some embodiments, the first half of the gRNA core and the second half of the gRNA core are selected from the paired first half gRNA core sequences and second half gRNA sequences provided in Table 2.

[0062] In certain embodiments, the PEgRNAs further comprise a tag sequence that comprises a region of complementarity to the PBS and/or the editing template. In some embodiments, the PEgRNAs comprise, in 5′ to 3′ order, the spacer, the first half of the gRNA core, the second half of the gRNA core, the editing template, the PBS, and the tag sequence. In some embodiments, the PEgRNAs comprise, in 5′ to 3′ order: the editing template, the spacer, the tag sequence, the spacer, the first half of the gRNA core, and the second half of the gRNA core.

[0063] In some embodiments, the tag sequence comprises a region of complementarity to the editing template and does not have substantial complementarity to the PBS. In some embodiments, the tag sequence comprises a region of complementarity to the editing template and does not have complementarity to the PBS. In some embodiments, the 5′ end of the tag sequence comprises a region of complementarity to a position between 1, 2, 3, 4, 5, 6, 7, 8, 9, 10, 11, 12, 13, 14, 15, 16 bases 5′ of the 3′ end of the editing template. In some embodiments, the tag sequence does not have substantial complementarity to the spacer. In some embodiments, the tag does not have complementarity to the spacer. In some embodiments, the tag sequence is 1, 2, 3, 4, 5, 6, 7, 8, 9, 10, 11, 12, 13, 14, 15, 16 nucleotides in length. The tag sequence may be at least 4 nucleotides in length, at least 6 nucleotides in length, or at least 8 nucleotides in length. The tag sequence may be 2-12 nucleotides in length. In some embodiments, the tag sequence comprises a nucleic acid sequence selected from SEQ REF NOs 62-1960. In some embodiments, the PEgRNA comprises one or more nucleic acid moieties at its 3′ half. In some embodiments, the PEgRNA comprise, in 5′ to 3′ order, the spacer, the gRNA core, the editing template, and the PBS.

[0064] In some embodiments, the one or more nucleic acid moieties comprise a hairpin (e.g., hairpin comprising a region of self-complementarity, optionally wherein the region of self-complementary comprises 2, 3, 4, 5, 6, 7, 8, 9, or 10 contiguous complementary basepairs), a quadruplex (e.g., a G-quadruplex or a C-quadruplex, optionally wherein the G-quadruplex or the C-quadruplex is derived from a VEGF gene promoter), a tRNA sequence (e.g., a tRNA sequence, optionally wherein the tRNA sequence is a tRNA (Proline) sequence), an aptamer (e.g., an aptamer derived from a viral protein-binding sequence, optionally wherein the aptamer comprises a viral reverse transcriptase recruitment sequence, optionally wherein the aptamer comprises a MS2 protein binding sequence or a Moloney Murine leukemia (MMLV) reverse transcriptase recruitment sequence), and/or a pseudoknot (e.g., pseudoknot is derived form a potato roll leaf virus (PLRV)), or any combination thereof. In some embodiments, the one or more nucleic acid moieties comprise a structure derived form a replication recognition sequence of a retrovirus, optionally wherein the retrovirus is a Moloney Murine leukemia (MMLV). For example, the one or more nucleic acid moieties may comprise a configuration as set forth in Table 2. In some embodiments, the one or more nucleic acid moieties comprise a nucleic acid sequence selected from SEQ ID NOs 1-15.

[0065] In some embodiments, the PEgRNA comprises a linker. In some embodiments, the linker is: i) immediately 5′ of the one or more nucleic acid moieties, ii) immediately 5′ of the tag sequence, iii) immediately 3′ of the tag sequence, iv) immediately 3′ of the spacer, v) immediately 5′ of the spacer, vi) immediately 3′ of the gRNA core, and/or vii) immediately 5′ of the gRNA core. In some embodiments, the linker is 1, 2, 3, 4, 5, 6, 7, 8, 9, 10, 11, 12, 13, 14, 15, 16 nucleotides in length. In some embodiments, the linker does not form a secondary structure. In some embodiments, the linker does not have a region of complementarity to the PBS sequence. In some embodiments, the linker does not have a region of complementarity to the editing template.

[0066] In some embodiments, the 5′ part of a gRNA core and the 3′ part of a guide RNA (gRNA) core comprises one or more sequence modifications compared to SEQ ID NO. 16. In some embodiments, the one or more sequence modifications comprises a gRNA core difference set forth in Table 1 or Table 2. In some embodiments, the linker comprises a nucleic acid sequence selected from SEQ REF NOs 1961-3859.

[0067] In some embodiments, the one or more sequence modifications comprises a sequence modification in the direct repeat. For example, the direct repeat may comprise at least one flip of an A-U basepair in a lower stem of the direct repeat, optionally wherein the lower stem does not contain 2, 3, 4, or more contiguous A-U basepairs; and/or at least one flip of an A/U basepair in the direct repeat comprises a flip of the fourth A/U basepair in the lower stem of the direct repeat. In some embodiments, the sequence modification in the direct repeat comprises an extension in the upper stem of the direct repeat. The extension in the upper stem of the direct repeat may be from 1, 2, 3, 4, 5, 6, 7, 8, 9, 10, 11, 12, 13, 14, 15, or 16 basepairs. In some embodiments, the direct repeat comprises a sequence selected from SEQ ID NOs: 26-37. In some embodiments, the one or more sequence modifications comprises a modification in the second stem loop. In some embodiments, the modification in the second stem loop comprises a flip of a G/C basepair in the second stem loop. In some embodiments, the gRNA core comprises a nucleic acid sequence selected from SEQ ID NOs: 21, 22 or 25. In some embodiments, the gRNA core comprises a sequence selected from SEQ ID NOs: 16-61.

[0068] In certain aspects, provided herein are methods of making a PEgRNA as described herein, the method comprising ligating the first sequence to the second sequence.

[0069] In certain aspects, provided herein are methods of making a PEgRNA, the method comprising synthesizing a polynucleotide comprising a sequence encoding a PEgRNA as described herein.

[0070] In certain aspects, provided herein are PEgRNA systems comprising a PEgRNA as described herein.

[0071] In certain aspects, provided herein are prime editing complexes comprising: (i) the PEgRNA of this disclosure or the PEgRNA system of this disclosure; and (ii) a prime editor comprising a DNA binding domain and a DNA polymerase domain. In some embodiments, the DNA binding domain is a CRISPR associated (Cas) protein domain. In some embodiments, the Cas protein domain has nickase activity. In some embodiments, the Cas protein domain is a Cas9. In some embodiments, the Cas9 comprises a mutation in an HNH domain. In some embodiments, the Cas9 comprises a H840A mutation in the HNH domain. In some embodiments, the Cas protein domain is a Cas12b. In some embodiments, the Cas protein domain is a Cas12a, Cas12b, Cas12c, Cas12d, Cas12e, Cas14a, Cas14b, Cas14c, Cas14d, Cas14e, Cas14f, Cas14g, Cas14h, Cas14u, or a Casφ. In some embodiments, the DNA polymerase domain is a reverse transcriptase. Many reverse transcriptase enzymes have DNA-dependent DNA synthesis abilities in addition to RNA-dependent DNA synthesis abilities, i.e., reverse transcription). In some embodiments, the reverse transcriptase is a retrovirus reverse transcriptase. In some embodiments, the reverse transcriptase is a Moloney murine leukemia virus (M-MLV) reverse transcriptase. In some embodiments, the DNA polymerase and the programmable DNA binding domain are fused or linked to form a fusion protein. In some embodiments, the fusion protein comprises the sequence of SEQ ID NO: 4440.

[0072] In certain aspects, provided herein are lipid nanoparticles (LNPs) or ribonucleoproteins (RNPs) comprising a prime editing complex or a component thereof. One embodiment provides a polynucleotide encoding the PEgRNA of this disclosure, the PEgRNA system of this disclosure, or the fusion protein of this disclosure. In some embodiments, the polynucleotide is an mRNA. In some embodiments, the polynucleotide is operably linked to a regulatory element. In some embodiments, the regulatory element is an inducible regulatory element.

[0073] In certain aspects, provided herein are vectors comprising the polynucleotide of above embodiments. In some embodiments, the vector is an AAV vector.

[0074] In certain aspects, provided herein are isolated cells comprising a PEgRNA of this disclosure, the PEgRNA system of this disclosure, a prime editing complex of this disclosure, a LNP or RNP of any one of the above embodiments, a polynucleotide of any one of the above embodiments, and/or a vector of any one the above embodiments. In some embodiments, the cell is a human cell.

[0075] In some aspects, provided herein are pharmaceutical compositions comprising at least one of (i) the PEgRNAs of this disclosure, the PEgRNA systems of this disclosure, the prime editing complex of this disclosure, an LNP or RNP of an embodiment described herein, the polynucleotide of any one of the above embodiments, the vector of any one of the above embodiments, and/or a cell of any one of the above embodiments; and at least one (ii) a pharmaceutically acceptable carrier.

[0076] In certain aspects, provided herein are methods for editing a gene, the method comprising contacting the gene with any one of (i) the PEgRNAs of this disclosure or any one of the PEgRNA systems of this disclosure and (ii) a prime editor comprising a DNA binding domain and a DNA polymerase domain, wherein the PEgRNA directs the prime editor to incorporate the intended nucleotide edit in the gene, thereby editing the gene.

[0077] In certain aspects, also provided herein are methods for editing a gene, the method comprising contacting the gene with the prime editing complex disclosed herein, wherein the PEgRNA directs the prime editor to incorporate the intended nucleotide edit in the gene, thereby editing the gene.

[0078] In some embodiments, the prime editor synthesizes a single stranded DNA encoded by the editing template, wherein the single stranded DNA replaces the editing target sequence and results in incorporation of the intended nucleotide edit into a region corresponding to the editing target in the gene. In some embodiments, the gene is in a cell. In some embodiments, the cell is a mammalian cell. In some embodiments, the cell is a human cell. In some embodiments, the cell is a primary cell. In some embodiments, the cell is in a subject. In some embodiments, the subject is a human. In some embodiments, the method further comprises administering the cell to the subject after incorporation of the intended nucleotide edit.

[0079] In certain embodiments, provided herein are cells generated by any one of above methods. In certain embodiments, provided herein are a population of cells generated by any one of the methods provided herein.

### BRIEF DESCRIPTION OF THE DRAWINGS

[0080] The novel features of the methods and compositions provided herein are set forth with particularity in the appended claims. A better understanding of the features and advantages of the methods and compositions provided herein will be obtained by reference to the following detailed description that sets forth illustrative embodiments, in which the principles of the methods and compositions provided herein are utilized, and the accompanying drawings of which:

[0081] FIG. 1 show exemplary nucleic acid moieties (e.g., for inclusion on the 3′ end of a PEgRNA disclosed herein). FIG. 1 discloses SEQ ID NOS 1, 7, 3, 6, 5 and 4, respectively, in order of appearance.

[0082] FIG. 2 are three graphs showing nucleic acid moieties increase editing efficiency. Each violin plot represents combination 48 unique PEgRNAs (1 spacer, 3 unique edits, 4 PBS lengths, 4 RTT lengths).

[0083] FIG. 3 shows an exemplary PEgRNA with spacer and PBS.

[0084] FIG. 4 shows an exemplary PEgRNAs with spacer, RTT, PBS, linker, and tag.

[0085] FIG. 5 shows an exemplary PEgRNA an exemplary PEgRNAs with spacer, RTT, PBS, linker, and tag with arrow pointing to the “0” position used in to FIGS. 6 and 7.

[0086] FIG. 6 are graphs showing the effect of the tag start position on prime editing efficiency.

[0087] FIG. 7 are graphs showing the effect of the tag start position on prime editing efficiency.

[0088] FIG. 8 shows an exemplary PEgRNA gRNA core (SEQ ID NO: 16). The dashed line and arrows represent two potential positions where the PEgRNA can be split into two RNA molecules for separate synthesis (e.g., prior to ligation).

[0089] FIG. 9 are graphs showing editing efficiencies by LegRNAs.

[0090] FIG. 10 shows a schematic illustrating exemplary oligonucleotide library design. FIG. 10 discloses SEQ ID NOS 7063-7065, respectively, in order of appearance.

[0091] FIG. 11 shows a schematic illustrated exemplary amplified oligonucleotide library. FIG. 11 discloses SEQ ID NOS 7066, 7054, 7067-7069, respectively, in order of appearance.

[0092] FIG. 12 shows an exemplary structure of a spacer and gRNA core of a PEgRNA, with one flip of an A-U basepair in the lower stem of the direct repeat and a 5-nucleotide extension in the upper stem of the direct repeat (SEQ ID NO: 7070). The rest of the PEgRNA, e.g., editing template and PBS, are not shown.

[0093] FIG. 13A-C are graphs showing the effect of tag (Comp Tag) binding position on prime editing efficiency. FIG. 13A shows binding position on prime editing efficiency for tags that are 4 nucleotides in length. FIG. 13B shows binding position on prime editing efficiency for tags that are 6 nucleotides in length. FIG. 13C shows binding position on prime editing efficiency for tags that are 8 nucleotides in length.

[0094] FIG. 14 is a graph showing the effect of tag (CompTag) length on prime editing efficiency for the pool of tags that bind entirely within the edit template of the PEgRNA.

### DETAILED DESCRIPTION

[0095] Provided herein, in some embodiments, are compositions and methods related to modified prime editing guide RNAs (PEgRNAs) useful, for example, in prime editing applications. In certain embodiments, provided herein are compositions and methods for introducing intended nucleotide edits in target DNA, e.g., correction of mutations in a gene, including a gene associated with a disease. Compositions provided herein can comprise PEgRNAs that can guide prime editors (PEs) to specific DNA targets and introduce nucleotide edits on the target gene.

[0096] The following description and examples illustrate embodiments of the present disclosure in detail. It is to be understood that this disclosure is not limited to the particular embodiments described herein and as such can vary. Those of skill in the art will recognize that there are numerous variations and modifications of this disclosure, which are encompassed within its scope. Although various features of the present disclosure can be described in the context of a single embodiment, the features can also be provided separately or in any suitable combination. Conversely, although the present disclosure can be described herein in the context of separate embodiments for clarity, the present disclosure can also be implemented in a single embodiment.

### Definitions

[0097] Unless defined otherwise, all technical and scientific terms used herein have the same meaning as is commonly understood by one of ordinary skill in the art.

[0098] The terminology used herein is for the purpose of describing particular embodiments only and is not intended to be limiting. As used herein, the singular forms “a”, “an” and “the” are intended to include the plural forms as well, unless the context clearly indicates otherwise. Furthermore, to the extent that the terms “including”, “includes”, “having”, “has”, “with”, or variants thereof as used herein mean “comprising”.

[0099] Unless otherwise specified, the words “comprising”, “comprise”, “comprises”, “having”, “have”, “has”, “including”, “includes”, “include”, “containing”, “contains” and “contain” are inclusive or open-ended and do not exclude additional, unrecited elements or method steps.

[0100] Reference to “some embodiments”, “an embodiment”, “one embodiment”, or “other embodiments” means that a particular feature or characteristic described in connection with the embodiments is included in at least one or more embodiments, but not necessarily all embodiments, of the present disclosure.

[0101] The term “about” or “approximately” means within 10% of a given value, rounded up where only integers are applicable. For example, about 100 means from 90 to 110 and about 7 means from 6 to 8. Where particular values are described in the application and claims, unless otherwise stated, the value should be assumed to be modified by the term “about”.

[0102] As used herein, a “cell” can generally refer to a biological cell. A cell can be the basic structural, functional and/or biological unit of a living organism. A cell can originate from any organism having one or more cells. Some non-limiting examples include: a prokaryotic cell, eukaryotic cell, a bacterial cell, an archacal cell, a cell of a single-cell eukaryotic organism, a protozoa cell, a cell from a plant, an animal cell, a cell from an invertebrate animal (e.g. fruit fly, cnidarian, echinoderm, nematode, etc.), a cell from a vertebrate animal (e.g., fish, amphibian, reptile, bird, mammal), a cell from a mammal (e.g., a pig, a cow, a goat, a sheep, a rodent, a rat, a mouse, a non-human primate, a human, etc.), et cetera. Sometimes a cell may not originate from a natural organism (e.g., a cell can be synthetically made, sometimes termed an artificial cell).

[0103] In some embodiments, the cell is a human cell. A cell may be of or derived from different tissues, organs, and/or cell types. In some embodiments, the cell is a primary cell. In some embodiments, the term primary cell means a cell isolated from an organism, e.g., a mammal, which is grown in tissue culture (i.e., in vitro) for the first time before subdivision and transfer to a subculture. In some non-limiting examples, mammalian primary cells can be modified through introduction of one or more polynucleotides, polypeptides, and/or prime editing compositions (e.g., through transfection, transduction, electroporation and the like) and further passaged. Such modified mammalian primary cells include muscle cells (e.g., cardiac muscle cells, smooth muscle cells, myosatellite cells), epithelial cells (e.g., mammary epithelial cells, intestinal epithelial cells, hepatocytes), endothelial cells, glial cells, neural cells, formed elements of the blood (e.g., lymphocytes, bone marrow cells), precursors of any of these somatic cell types, and stem cells. In some embodiments, the cell is a fibroblast. In some embodiments, the cell is a stem cell. In some embodiments, the cell is a pluripotent stem cell. In some embodiments, the cell is an induced pluripotent stem cell (iPSC). In some embodiments, the cell is a stem cell. In some embodiments, the cell is an embryonic stem cell (ESC). In some embodiments, the cell is a human stem cell. In some embodiments, the cell is a human pluripotent stem cell. In some embodiments, the cell is a human fibroblast. In some embodiments, the cell is an induced human pluripotent stem cell (iPSC). In some embodiments, the cell is a human stem cell. In some embodiments, the cell is a human embryonic stem cell.

[0104] In some embodiments, a cell is not isolated from an organism but forms part of a tissue or organ of an organism, e.g., a mammal. In some non-limiting examples, mammalian cells include muscle cells (e.g., cardiac muscle cells, smooth muscle cells, myosatellite cells), epithelial cells (e.g., mammary epithelial cells, intestinal epithelial cells, hepatocytes), endothelial cells, glial cells, neural cells, formed elements of the blood (e.g., lymphocytes, bone marrow cells), precursors of any of these somatic cell types, and stem cells. In some embodiments, the cell is a primary muscle cell. In some embodiments, the cell is a myosatellite cell (a satellite cell). In some embodiments, the cell is a human myosatellite cell (a satellite cell). In some embodiments, the cell is a stem cell. In some embodiments, the cell is a human stem cell.

[0105] In some embodiments, the cell is a differentiated cell. In some embodiments, cell is a fibroblast. In some embodiments, the cell is a differentiated muscle cell, a myosatellite cell, a differentiated epithelial cell, or a differentiated neuron cell. In some embodiments, the cell is a skeletal muscle cell. In some embodiments, the skeletal muscle cell is differentiated from an iPSC, ESC or myosatellite cell. In some embodiments, the cell is a differentiated human cell. In some embodiments, cell is a human fibroblast. In some embodiments, the cell is a differentiated human muscle cell. In some embodiments, cell is a human myosatellite cell. In some embodiments, the cell is a human skeletal muscle cell. In some embodiments, the human skeletal muscle cell is differentiated from a human iPSC, human ESC or human myosatellite cell. In some embodiments, the cell is differentiated from a human iPSC or human ESC.

[0106] In some embodiments, the cell comprises a prime editor, a PEgRNA, a ngRNA, a prime editing system, or a prime editing complex. In some embodiments, the cell is from a human subject. In some embodiments, the human subject has a disease or condition associated with a mutation to be corrected by prime editing. In some embodiments, the cell is from a human subject, and comprises a prime editor, a PEgRNA, a ngRNA, a prime editing system, or a prime editing complex for correction of the mutation. In some embodiments, the cell is from the human subject and the mutation has been edited or corrected by prime editing. In some embodiments, the cell is in a human subject, and comprises a prime editor, a PEgRNA, a ngRNA, a prime editing system, or a prime editing complex for correction of the mutation. In some embodiments, the cell is from the human subject and the mutation has been edited or corrected by prime editing.

[0107] The term “substantially” as used herein may refer to a value approaching 100% of a given value. In some embodiments, the term may refer to an amount that may be at least about 70%, 80%, 90%, 91%, 92%, 93%, 94%, 95%, 96%, 97%, 98%, 99%, 99.9%, or 99.99% of a total amount. In some embodiments, the term may refer to an amount that may be about 100% of a total amount.

[0108] The terms “protein” and “polypeptide” can be used interchangeably to refer to a polymer of two or more amino acids joined by covalent bonds (e.g., an amide bond) that can adopt a three-dimensional conformation. In some embodiments, a protein or polypeptide comprises at least 10 amino acids, 15 amino acids, 20 amino acids, 30 amino acids or 50 amino acids joined by covalent bonds (e.g., amide bonds). In some embodiments, a protein comprises at least two amide bonds. In some embodiments, a protein comprises multiple amide bonds. In some embodiments, a protein comprises an enzyme, enzyme precursor proteins, regulatory protein, structural protein, receptor, nucleic acid binding protein, a biomarker, a member of a specific binding pair (e.g., a ligand or aptamer), or an antibody. In some embodiments, a protein may be a full-length protein (e.g., a fully processed protein having certain biological function). In some embodiments, a protein may be a variant or a fragment of a full-length protein. For example, in some embodiments, a Cas9 protein domain comprises an H840A amino acid substitution compared to a naturally occurring S. pyogenes Cas9 protein. A variant of a protein or enzyme, for example a variant reverse transcriptase, comprises a polypeptide having an amino acid sequence that is about 60% identical, about 70% identical, about 80% identical, about 90% identical, about 95% identical, about 96% identical, about 97% identical, about 98% identical, about 99% identical, about 99.5% identical, or about 99.9% identical to the amino acid sequence of a reference protein.

[0109] In some embodiments, a protein comprises one or more protein domains or subdomains. As used herein, the term “polypeptide domain”, “protein domain”, or “domain” when used in the context of a protein or polypeptide, refers to a polypeptide chain that has one or more biological functions, e.g., a catalytic function, a protein-protein binding function, or a protein-DNA function. In some embodiments, a protein comprises multiple protein domains. In some embodiments, a protein comprises multiple protein domains that are naturally occurring. In some embodiments, a protein comprises multiple protein domains from different naturally occurring proteins. For example, in some embodiments, a prime editor may be a fusion protein comprising a Cas9 protein domain of S. pyogenes and a reverse transcriptase protein domain of Moloney murine leukemia virus. A protein that comprises amino acid sequences from different origins or naturally occurring proteins may be referred to as a fusion, or chimeric protein.

[0110] In some embodiments, a protein comprises a functional variant or functional fragment of a full-length wild type protein. A “functional fragment” or “functional portion”, as used herein, refers to any portion of a reference protein (e.g., a wild type protein) that encompasses less than the entire amino acid sequence of the reference protein while retaining one or more of the functions, e.g., catalytic or binding functions. For example, a functional fragment of a reverse transcriptase may encompass less than the entire amino acid sequence of a wild type reverse transcriptase, but retains the ability under at least one set of conditions to catalyze the polymerization of a polynucleotide. When the reference protein is a fusion of multiple functional domains, a functional fragment thereof may retain one or more of the functions of at least one of the functional domains. For example, a functional fragment of a Cas9 may encompass less than the entire amino acid sequence of a wild type Cas9, but retains its DNA binding ability and lacks its nuclease activity partially or completely.

[0111] A “functional variant” or “functional mutant”, as used herein, refers to any variant or mutant of a reference protein (e.g., a wild type protein) that encompasses one or more alterations to the amino acid sequence of the reference protein while retaining one or more of the functions, e.g., catalytic or binding functions. In some embodiments, the one or more alterations to the amino acid sequence comprises amino acid substitutions, insertions or deletions, or any combination thereof. In some embodiments, the one or more alterations to the amino acid sequence comprises amino acid substitutions. For example, a functional variant of a reverse transcriptase may comprise one or more amino acid substitutions compared to the amino acid sequence of a wild type reverse transcriptase, but retains the ability under at least one set of conditions to catalyze the polymerization of a polynucleotide. When the reference protein is a fusion of multiple functional domains, a functional variant thereof may retain one or more of the functions of at least one of the functional domains. For example, in some embodiments, a functional fragment of a Cas9 may comprise one or more amino acid substitutions in a nuclease domain, e.g., an H840A amino acid substitution, compared to the amino acid sequence of a wild type Cas9, but retains the DNA binding ability and lacks the nuclease activity partially or completely.

[0112] The term “function” and its grammatical equivalents as used herein may refer to a capability of operating, having, or serving an intended purpose. Functional may comprise any percent from baseline to 100% of an intended purpose. For example, functional may comprise or comprise about 5%, 10%, 15%, 20%, 25%, 30%, 35%, 40%, 45%, 50%, 55%, 60%, 65%, 70%, 75%, 80%, 85%, 90%, 95%, or up to about 100% of an intended purpose. In some embodiments, the term functional may mean over or over about 100% of normal function, for example, 125%, 150%, 175%, 200%, 250%, 300%, 400%, 500%, 600%, 700% or up to about 1000% of an intended purpose. In some embodiments, a protein or polypeptides includes naturally occurring amino acids (e.g., one of the twenty amino acids commonly found in peptides synthesized in nature, and known by the one letter abbreviations A, R, N, C, D, Q, E, G, H, I, L, K, M, F, P, S, T, W, Y and V). In some embodiments, a protein or polypeptides includes non-naturally occurring amino acids (e.g., amino acids which is not one of the twenty amino acids commonly found in peptides synthesized in nature, including synthetic amino acids, amino acid analogs, and amino acid mimetics). In some embodiments, a protein or polypeptide is modified.

[0113] In some embodiments, a protein comprises an isolated polypeptide. The term “isolated” means free or removed to varying degrees from components which normally accompany it as found in the natural state or environment. For example, a polypeptide naturally present in a living animal is not isolated, and the same polypeptide partially or completely separated from the coexisting materials of its natural state is isolated.

[0114] In some embodiments, a protein is present within a cell, a tissue, an organ, or a virus particle. In some embodiments, a protein is present within a cell or a part of a cell (e.g., a bacteria cell, a plant cell, or an animal cell). In some embodiments, the cell is in a tissue, in a subject, or in a cell culture. In some embodiments, the cell is a microorganism (e.g., a bacterium, fungus, protozoan, or virus). In some embodiments, a protein is present in a mixture of analytes (e.g., a lysate). In some embodiments, the protein is present in a lysate from a plurality of cells or from a lysate of a single cell.

[0115] The terms “homologous,” “homology,” or “percent homology” as used herein refer to the degree of sequence identity between an amino acid or polynucleotide sequence and a corresponding reference sequence. “Homology” can refer to polymeric sequences, e.g., polypeptide or DNA sequences that are similar. Homology can mean, for example, nucleic acid sequences with at least about: 50%, 55%, 60%, 65%, 70%, 75%, 80%, 81%, 82%, 83%, 84%, 85%, 86%, 87%, 88%, 89%, 90%, 91%, 92%, 93%, 94%, 95%, 96%, 97%, 98%, 99%, or 100% identity. In other embodiments, a “homologous sequence” of nucleic acid sequences may exhibit 93%, 95% or 98% sequence identity to the reference nucleic acid sequence. For example, a “region of homology to a genomic region” can be a region of DNA that has a similar sequence to a given genomic region in the genome. A region of homology can be of any length that is sufficient to promote binding of a spacer, primer binding site or protospacer sequence to the genomic region. For example, the region of homology can comprise at least 5, 10, 11, 12, 13, 14, 15, 16, 17, 18, 19, 20, 21, 22, 23, 24, 25, 30, 35, 40, 45, 50, 55, 60, 65, 70, 75, 80, 85, 90, 95, 100, 200, 300, 400, 500, 600, 700, 800, 900, 1000, 1100, 1200, 1300, 1400, 1500, 1600, 1700, 1800, 1900, 2000, 2100, 2200, 2300, 2400, 2500, 2600, 2700, 2800, 2900, 3000, 3100 or more bases in length such that the region of homology has sufficient homology to undergo binding with the corresponding genomic region.

[0116] When a percentage of sequence homology or identity is specified, in the context of two nucleic acid sequences or two polypeptide sequences, the percentage of homology or identity generally refers to the alignment of two or more sequences across a portion of their length when compared and aligned for maximum correspondence. When a position in the compared sequence can be occupied by the same base or amino acid, then the molecules can be homologous at that position. Unless stated otherwise, sequence homology or identity is assessed over the specified length of the nucleic acid, polypeptide or portion thereof. In some embodiments, the homology or identity is assessed over a functional portion or specified portion of the length.

[0117] Alignment of sequences for assessment of sequence homology can be conducted by algorithms known in the art, such as the Basic Local Alignment Search Tool (BLAST) algorithm, which is described in Altschul et al, J. Mol. Biol. 215:403-410, 1990. A publicly available, internet interface, for performing BLAST analyses is accessible through the National Center for Biotechnology Information. Additional known algorithms include those published in: Smith & Waterman, “Comparison of Biosequences”, Adv. Appl. Math. 2:482, 1981; Needleman & Wunsch, “A general method applicable to the search for similarities in the amino acid sequence of two proteins” J. Mol. Biol. 48:443, 1970; Pearson & Lipman “Improved tools for biological sequence comparison”, Proc. Natl. Acad. Sci. USA 85:2444, 1988; or by automated implementation of these or similar algorithms. Global alignment programs may also be used to align similar sequences of roughly equal size. Examples of global alignment programs include NEEDLE (available at www.ebi.ac.uk/Tools/psa/emboss_needle/) which is part of the EMBOSS package (Rice P et al., Trends Genet., 2000; 16:276-277), and the GGSEARCH program https://fasta.bioch.virginia.edu/fasta_www2/, which is part of the FASTA package (Pearson W and Lipman D, 1988, Proc. Natl. Acad. Sci. USA, 85:2444-2448). Both of these programs are based on the Needleman-Wunsch algorithm which is used to find the optimum alignment (including gaps) of two sequences along their entire length. A detailed discussion of sequence analysis can also be found in Unit 19.3 of Ausubel et al (“Current Protocols in Molecular Biology” John Wiley & Sons Inc, 1994-1998, Chapter 15, 1998). Unless otherwise stated, percent identity should be determined based on an alignment between a query sequence and a reference sequence performed with Needleman-Wunsch alignment with Gap Costs set to Existence: 11 Extension: 1 where percent identity is calculated by dividing the number of identities by the length of the alignment.

[0118] A skilled person understands that amino acid (or nucleotide) positions may be determined in homologous sequences based on alignment, for example, “H840” in a reference Cas9 sequence may correspond to H839, or another position in a Cas9 homolog.

[0119] The term “polynucleotide” or “nucleic acid molecule” can be any polymeric form of nucleotides, including DNA, RNA, a hybridization thereof, or RNA-DNA chimeric molecules. In some embodiments, a polynucleotide comprises cDNA, genomic DNA, mRNA, tRNA, rRNA, or microRNA. In some embodiments, a polynucleotide is double stranded, e.g., a double-stranded DNA in a gene. In some embodiments, a polynucleotide is single-stranded or substantially single-stranded, e.g., single-stranded DNA or an mRNA. In some embodiments, a polynucleotide is a cell-free nucleic acid molecule. In some embodiments, a polynucleotide circulates in blood. In some embodiments, a polynucleotide is a cellular nucleic acid molecule. In some embodiments, a polynucleotide is a cellular nucleic acid molecule in a cell circulating in blood.

[0120] Polynucleotides can have any three-dimensional structure. The following are nonlimiting examples of polynucleotides: a gene or gene fragment (for example, a probe, primer, EST or SAGE tag), an exon, an intron, intergenic DNA (including, without limitation, heterochromatic DNA), messenger RNA (mRNA), transfer RNA (tRNA), ribosomal RNA (rRNA), a ribozyme, cDNA, a recombinant polynucleotide, a branched polynucleotide, a plasmid, a vector, isolated DNA, isolated RNA, sgRNA, guide RNA, a nucleic acid probe, a primer, an snRNA, a long non-coding RNA, a snoRNA, a siRNA, a miRNA, a tRNA-derived small RNA (tsRNA), an antisense RNA, an shRNA, or a small rDNA-derived RNA (srRNA).

[0121] In some embodiments, a polynucleotide comprises deoxyribonucleotides, ribonucleotides or analogs thereof. In some embodiments, a polynucleotide comprises modified nucleotides, such as methylated nucleotides and nucleotide analogs. If present, modifications to the nucleotide structure can be imparted before or after assembly of the polynucleotide. The sequence of nucleotides can be interrupted by non-nucleotide components. A polynucleotide can be further modified after polymerization, such as by conjugation with a labeling component.

[0122] In some embodiments, a polynucleotide is composed of a specific sequence of four nucleotide bases: adenine (A); cytosine (C); guanine (G); thymine (T); and uracil (U) for thymine when the polynucleotide is RNA. In some embodiments, the polynucleotide may comprise one or more other nucleotide bases, such as inosine (I), which is read by the translation machinery as guanine (G). Consistent with the ST.26 standard, RNA sequences provided herein, e.g., PEgRNA sequences, may contain “T”s instead of “U”s.

[0123] In some embodiments, a polynucleotide may be modified. As used herein, the terms “modified” or “modification” refers to chemical modification with respect to the A, C, G, T and U nucleotides. In some embodiments, modifications may be on the nucleoside base and/or sugar portion of the nucleosides that comprise the polynucleotide. In some embodiments, the modification may be on the internucleoside linkage (e.g., phosphate backbone). In some embodiments, multiple modifications are included in the modified nucleic acid molecule. In some embodiments, a single modification is included in the modified nucleic acid molecule.

[0124] The term “complement”, “complementary”, or “complementarity” as used herein, refers to the ability of two polynucleotide molecules to basepair with each other. Complementary polynucleotides may basepair via hydrogen bonding, which may be Watson Crick, Hoogsteen or reversed Hoogsteen hydrogen bonding. For example, an adenine on one polynucleotide molecule will basepair to a thymine or uracil on a second polynucleotide molecule, a cytosine on one polynucleotide molecule will basepair to a guanine on a second polynucleotide molecule, a guanine on one polynucleotide molecule will basepair to a cytosine or a uracil on a second polynucleotide molecule, and a thymine or uracil on one polynucleotide molecule will basepair to an adenine or a guanine on a second polynucleotide molecule. Two polynucleotide molecules are complementary to each other when a first polynucleotide molecule comprising a first nucleotide sequence can basepair with a second polynucleotide molecule comprising a second nucleotide sequence. For instance, the two DNA molecules 5′-ATGC-3′ and 5′-GCAT-3′ are complementary, and the complement of the DNA molecule 5′-ATGC-3′ is 5′-GCAT-3′. A percentage of complementarity indicates the percentage of nucleotides in a polynucleotide molecule which can basepair with a second polynucleotide molecule (e.g., 5, 6, 7, 8, 9, 10 out of 10 being 50%, 60%, 70%, 80%, 90%, and 100% complementary, respectively). “Perfectly complementary” means that all the contiguous nucleotides of a polynucleotide molecule will basepair with the same number of contiguous nucleotides in a second polynucleotide molecule. “Substantially complementary” as used herein refers to a degree of complementarity that can be 70%, 75%, 80%, 85%, 90%, 95%, 97%, 98%, or 99% over all or a portion of two polynucleotide molecules. In some embodiments, the portion of complementarity may be a region of 10, 15, 20, 25, 30, 35, 40, 45, 50, or more nucleotides. “Substantial complementary” can also refer to a 100% complementarity over a portion of two polynucleotide molecules. In some embodiments, the portion of complementarity between the two polynucleotide molecules is at least 60%, 65%, 70%, 75%, 80%, 85%, 90%, 95%, 97%, 98%, or 99% of the length of at least one of the two polynucleotide molecules or a functional or defined portion thereof.

[0125] As used herein, “expression” refers to the process by which polynucleotides are transcribed into mRNA and/or the process by which polynucleotides, e.g., the transcribed mRNA, translated into peptides, polypeptides, or proteins. If the polynucleotide is derived from genomic DNA, expression may include splicing of the mRNA in a eukaryotic cell. In some embodiments, expression of a polynucleotide, e.g., a gene or a DNA encoding a protein, is determined by the amount of the protein encoded by the gene after transcription and translation of the gene. In some embodiments, expression of a polynucleotide, e.g., a gene or a DNA encoding a protein, is determined by the amount of a functional form of the protein encoded by the gene after transcription and translation of the gene. In some embodiments, expression of a gene is determined by the amount of the mRNA, or transcript, that is encoded by the gene after transcription the gene. In some embodiments, expression of a polynucleotide, e.g., an mRNA, is determined by the amount of the protein encoded by the mRNA after translation of the mRNA. In some embodiments, expression of a polynucleotide, e.g., an mRNA or coding RNA, is determined by the amount of a functional form of the protein encoded by the polypeptide after translation of the polynucleotide.

[0126] The term “sequencing” as used herein, may comprise capillary sequencing, bisulfite-free sequencing, bisulfite sequencing, TET-assisted bisulfite (TAB) sequencing, ACE-sequencing, high-throughput sequencing, Maxam-Gilbert sequencing, massively parallel signature sequencing, Polony sequencing, 454 pyrosequencing, Sanger sequencing, Illumina sequencing, SOLID sequencing, Ion Torrent semiconductor sequencing, DNA nanoball sequencing, Heliscope single molecule sequencing, single molecule real time (SMRT) sequencing, nanopore sequencing, shot gun sequencing, RNA sequencing, or any combination thereof.

[0127] The terms “equivalent” or “biological equivalent” are used interchangeably when referring to a particular molecule, or biological or cellular material, and means a molecule having minimal homology to another molecule while still maintaining a desired structure or functionality.

[0128] The term “encode” as it is applied to polynucleotides refers to a polynucleotide which is said to “encode” another polynucleotide, a polypeptide, or an amino acid if, in its native state or when manipulated by methods well known to those skilled in the art, it can be used as polynucleotide synthesis template, e.g., transcribed into an RNA, reverse transcribed into a DNA or cDNA, and/or translated to produce an amino acid, or a polypeptide or fragment thereof. In some embodiments, a polynucleotide comprising three contiguous nucleotides form a codon that encodes a specific amino acid. In some embodiments, a polynucleotide comprises one or more codons that encode a polypeptide. In some embodiments, a polynucleotide comprising one or more codons comprises a mutation in a codon compared to a wild-type reference polynucleotide. In some embodiments, the mutation in the codon encodes an amino acid substitution in a polypeptide encoded by the polynucleotide as compared to a wild-type reference polypeptide.

[0129] The term “mutation” as used herein refers to a change and/or alteration in an amino acid sequence of a protein or nucleic acid sequence of a polynucleotide. Such changes and/or alterations may comprise the substitution, insertion, deletion and/or truncation of one or more amino acids, in the case of an amino acid sequence, and/or nucleotides, in the case of nucleic acid sequence, compared to a reference amino acid or nucleic acid sequence. In some embodiments, the reference sequence is a wild-type sequence. In some embodiments, a mutation in a nucleic acid sequence of a polynucleotide encodes a mutation in the amino acid sequence of a polypeptide. In some embodiments, the mutation in the amino acid sequence of the polypeptide or the mutation in the nucleic acid sequence of the polynucleotide is a mutation associated with a disease state.

[0130] The term “subject” and its grammatical equivalents as used herein may refer to a human or a non-human. A subject may be a mammal. A human subject may be male or female. A human subject may be of any age. A subject may be a human embryo. A human subject may be a newborn, an infant, a child, an adolescent, or an adult. A human subject may be up to about 100 years of age. A human subject may be in need of treatment for a genetic disease or disorder.

[0131] The terms “treatment” or “treating” and their grammatical equivalents may refer to the medical management of a subject with an intent to cure, ameliorate, or ameliorate a symptom of, a disease, condition, or disorder. Treatment may include active treatment, that is, treatment directed specifically toward the improvement of a disease, condition, or disorder. Treatment may include causal treatment, that is, treatment directed toward removal of the cause of the associated disease, condition, or disorder. In addition, this treatment may include palliative treatment, that is, treatment designed for the relief of symptoms rather than the curing of the disease, condition, or disorder. Treatment may include supportive treatment, that is, treatment employed to supplement another specific therapy directed toward the improvement of the disease, condition, or disorder. In some embodiments, a condition may be pathological. In some embodiments, a treatment may not completely cure or prevent a disease, condition, or disorder. In some embodiments, a treatment ameliorates, but does not completely cure or prevent a disease, condition, or disorder. In some embodiments, a subject may be treated for 12 hours, 24 hours, 2 days, 3 days, 4 days, 5 days, 6 days, 7 days, 2 weeks, 3 weeks, 4 weeks, 2 months, 3 months, 4 months, 5 months, 6 months, 1 year, 2 years, 3 years, 4 years, 5 years, 6 years, indefinitely, or life of the subject.

[0132] The term “ameliorate” and its grammatical equivalents means to decrease, suppress, attenuate, diminish, arrest, or stabilize the development or progression of a disease.

[0133] The terms “prevent” or “preventing” means delaying, forestalling, or avoiding the onset or development of a disease, condition, or disorder for a period of time. Prevent also means reducing risk of developing a disease, disorder, or condition. Prevention includes minimizing or partially or completely inhibiting the development of a disease, condition, or disorder. In some embodiments, a composition, e.g., a pharmaceutical composition, prevents a disorder by delaying the onset of the disorder for 12 hours, 24 hours, 2 days, 3 days, 4 days, 5 days, 6 days, 7 days, 2 weeks, 3 weeks, 4 weeks, 2 months, 3 months, 4 months, 5 months, 6 months, 1 year, 2 years, 3 years, 4 years, 5 years, 6 years, indefinitely, or life of a subject.

[0134] The term “effective amount” or “therapeutically effective amount” may refer to a quantity of a composition, for example a composition comprising a construct, that can be sufficient to result in a desired activity upon introduction into a subject as disclosed herein. An effective amount of the prime editing compositions can be provided to the target gene or cell, whether the cell is ex vivo or in vivo.

[0135] An effective amount can be the amount to induce, for example, at least about a 2-fold change (increase or decrease) or more in the amount of target nucleic acid modulation (e.g., expression of a gene to produce functional a protein) observed relative to a negative control. An effective amount or dose can induce, for example, about 2-fold increase, about 3-fold increase, about 4-fold increase, about 5-fold increase, about 6-fold increase, about 7-fold increase, about 8-fold increase, about 9-fold increase, about 10-fold increase, about 25-fold increase, about 50-fold increase, about 100-fold increase, about 200-fold increase, about 500-fold increase, about 700-fold increase, about 1000-fold increase, about 5000-fold increase, or about 10,000-fold increase in target gene modulation (e.g., expression of a target gene to produce a functional protein).

[0136] The amount of target gene modulation may be measured by any suitable method known in the art. In some embodiments, the “effective amount” or “therapeutically effective amount” is the amount of a composition that is required to ameliorate the symptoms of a disease relative to an untreated patient. In some embodiments, an effective amount is the amount of a composition sufficient to introduce an alteration in a gene of interest in a cell (e.g., a cell in vitro or in vivo).

### Prime Editing

[0137] The term “prime editing” refers to programmable editing of a target DNA using a prime editor complexed with a PEgRNA to incorporate an intended nucleotide edit into the target DNA through target-primed DNA synthesis. A target polynucleotide, e.g., a target gene of prime editing may comprise a double stranded DNA molecule having two complementary strands: a first strand that may be referred to as a “target strand” or a “non-edit strand”, and a second strand that may be referred to as a “non-target strand,” or an “edit strand.” In some embodiments, in a prime editing guide RNA (PEgRNA), a spacer sequence is complementary or substantially complementary to a specific sequence on the target strand, which may be referred to as a “search target sequence”. In some embodiments, the spacer sequence anneals with the target strand at the search target sequence. The target strand may also be referred to as the “non-Protospacer Adjacent Motif (non-PAM strand).” In some embodiments, the non-target strand may also be referred to as the “PAM strand”. In some embodiments, the PAM strand comprises a protospacer sequence and optionally a protospacer adjacent motif (PAM) sequence. In prime editing using a Cas-protein-based prime editor, a PAM sequence refers to a short DNA sequence immediately adjacent to the protospacer sequence on the PAM strand of the target gene. A PAM sequence may be specifically recognized by a programmable DNA binding protein, e.g., a Cas nickase or a Cas nuclease In some embodiments, a specific PAM is characteristic of a specific programmable DNA binding protein, e.g., a Cas nickase or a Cas nuclease. A protospacer sequence refers to a specific sequence in the PAM strand of the target gene that is complementary to the search target sequence. In a PEgRNA, a spacer sequence may have a substantially identical sequence as the protospacer sequence on the edit strand of a target gene, except that the spacer sequence may comprise Uracil (U) and the protospacer sequence may comprise Thymine (T).

[0138] In some embodiments, the double stranded target DNA comprises a nick site on the PAM strand (or non-target strand). As used herein, a “nick site” refers to a specific position in between two nucleotides or two basepairs of the double stranded target DNA. In some embodiments, the position of a nick site is determined relative to the position of a specific PAM sequence. In some embodiments, the nick site is the particular position where a nick will occur when the double stranded target DNA is contacted with a nickase, for example, a Cas nickase, that recognizes a specific PAM sequence. In some embodiments, the nick site is upstream of a specific PAM sequence on the PAM strand of the double stranded target DNA. In some embodiments, the nick site is downstream of a specific PAM sequence on the PAM strand of the double stranded target DNA. In some embodiments, the nick site is 3 basepairs upstream of the PAM sequence, and the PAM sequence is recognized by a Streptococcus pyogenes Cas9 nickase, a P. lavamentivorans Cas9 nickase, a C. diphtheriae Cas9 nickase, a N. cinerea Cas9, a S. aureus Cas9, or a N. lari Cas9 nickase. In some embodiments, the nick site is 3 basepairs upstream of the PAM sequence, and the PAM sequence is recognized by a Cas9 nickase, wherein the Cas9 nickase comprises a nuclease active HNH domain and a nuclease inactive RuvC domain. In some embodiments, the nick site is 2 basepairs upstream of the PAM sequence, and the PAM sequence is recognized by a S. thermophilus Cas9 nickase.

[0139] In some embodiments, a PEgRNA complexes with and directs a prime editor to bind to the search target sequence of the target gene. In some embodiments, the bound prime editor generates a nick on the edit strand (PAM strand) of the target gene at the nick site. In some embodiments, a primer binding site (PBS) of the PEgRNA anneals with a free 3′ end formed at the nick site, and the prime editor initiates DNA synthesis from the nick site, using the free 3′ end as a primer. Subsequently, a single-stranded DNA encoded by the editing template of the PEgRNA is synthesized. In some embodiments, the newly synthesized single-stranded DNA comprises one or more intended nucleotide edits compared to the endogenous target gene sequence. In some embodiments, the editing template of a PEgRNA is complementary to a sequence in the edit strand except for one or more mismatches at the intended nucleotide edit positions in the editing template partially complementary to the editing template may be referred to as an “editing target sequence”. Accordingly, in some embodiments, the newly synthesized single stranded DNA has identity or substantial identity to a sequence in the editing target sequence, except for one or more insertions, deletions, or substitutions at the intended nucleotide edit positions.

[0140] In some embodiments, the newly synthesized single-stranded DNA equilibrates with the editing target on the edit strand of the target gene for pairing with the target strand of the target gene. In some embodiments, the editing target sequence of the target gene is excised by a flap endonuclease (FEN), for example, FEN1. In some embodiments, the FEN is an endogenous FEN, for example, in a cell comprising the target gene. In some embodiments, the FEN is provided as part of the prime editor, either linked to other components of the prime editor or provided in trans. In some embodiments, the newly synthesized single stranded DNA, which comprises the intended nucleotide edit, replaces the endogenous single stranded editing target sequence on the edit strand of the target gene. In some embodiments, the newly synthesized single stranded DNA and the endogenous DNA on the target strand form a heteroduplex DNA structure at the region corresponding to the editing target sequence of the target gene. In some embodiments, the newly synthesized single-stranded DNA comprising the nucleotide edit is paired in the heteroduplex with the target strand of the target DNA that does not comprise the nucleotide edit, thereby creating a mismatch between the two otherwise complementary strands. In some embodiments, the mismatch is recognized by DNA repair machinery, e.g., an endogenous DNA repair machinery. In some embodiments, through DNA repair, the intended nucleotide edit is incorporated into the target gene.

### Modified PEgRNAs

[0141] In certain aspects, provided herein are modified PEgRNAs. The term “prime editing guide RNA”, or “PEgRNA”, refers to a guide polynucleotide that comprises one or more intended nucleotide edits for incorporation into the target DNA. In some embodiments, the PEgRNA associates with and directs a prime editor to incorporate the one or more (e.g., two or more, three or more, four or more, or five or more) intended nucleotide edits into the target gene via prime editing. “Nucleotide edit” or “intended nucleotide edit” refers to a specified deletion of one or more nucleotides at one specific position, insertion of one or more nucleotides at one specific position, substitution of a single nucleotide, or other alterations at one specific position to be incorporated into the sequence of the target gene. Intended nucleotide edit may refer to the edit on the editing template as compared to the sequence on the target strand of the target gene, or may refer to the edit encoded by the editing template on the newly synthesized single stranded DNA that replaces the editing target sequence, as compared to the editing target sequence. In some embodiments, a PEgRNA comprises a spacer sequence that is complementary or substantially complementary to a search target sequence on a target strand of the target gene. In some embodiments, the PEgRNA comprises a gRNA core that associates with a DNA binding domain, e.g., a CRISPR-Cas protein domain, of a prime editor. In some embodiments, the PEgRNA further comprises an extended nucleotide sequence comprising one or more intended nucleotide edits compared to the endogenous sequence of the target gene, wherein the extended nucleotide sequence may be referred to as an extension arm. In certain embodiments, the PEgRNA comprises a primer binding site sequence (PBS) that can initiate target-primed DNA synthesis. In some embodiments, the PEgRNA comprises an editing template that comprises one or more intended nucleotide edits to be incorporated in the target gene by prime editing. In some embodiments, the extension arm comprises a PBS. In some embodiments, the extension arm comprises an editing template that comprises one or more intended nucleotide edits to be incorporated in the target gene by prime editing.

[0142] A “primer binding site” (PBS or primer binding site sequence) is a single-stranded portion of the PEgRNA that comprises a region of complementarity to the PAM strand (i.e. the non-target strand or the edit strand). The PBS is complementary or substantially complementary to a sequence on the PAM strand of the double stranded target DNA that is immediately upstream of the nick site. In some embodiments, in the process of prime editing, the PEgRNA complexes with and directs a prime editor to bind the search target sequence on the target strand of the double stranded target DNA, and generates a nick at the nick site on the non-target strand of the double stranded target DNA. In some embodiments, the PBS is complementary to or substantially complementary to, and can anneal to, a free 3′ end on the non-target strand of the double stranded target DNA at the nick site. In some embodiments, the PBS annealed to the free 3′ end on the non-target strand can initiate target-primed DNA synthesis.

[0143] An “editing template” of a PEgRNA is a single-stranded portion of the PEgRNA that is 5′ of the PBS and comprises a region of complementarity to the PAM strand (i.e. the non-target strand or the edit strand), and comprises one or more intended nucleotide edits compared to the endogenous sequence of the double stranded target DNA. In some embodiments, the editing template and the PBS are immediately adjacent to each other. Accordingly, in some embodiments, a PEgRNA in prime editing comprises a single-stranded portion that comprises the PBS and the editing template immediately adjacent to each other. In some embodiments, the single stranded portion of the PEgRNA comprising both the PBS and the editing template is complementary or substantially complementary to an endogenous sequence on the PAM strand (i.e. the non-target strand or the edit strand) of the double stranded target DNA except for one or more non-complementary nucleotides at the intended nucleotide edit positions. As used herein, regardless of relative 5′-3′ positioning in other context, the relative positions as between the PBS and the editing template, and the relative positions as among elements of a PEgRNA, are determined by the 5′ to 3′ order of the PEgRNA as a single molecule regardless of the position of sequences in the double stranded target DNA that may have complementarity or identity to elements of the PEgRNA. In some embodiments, the editing template is complementary or substantially complementary to a sequence on the PAM strand that is immediately downstream of the nick site, except for one or more non-complementary nucleotides at the intended nucleotide edit positions. The endogenous, e.g., genomic, sequence that is complementary or substantially complementary to the editing template, except for the one or more non-complementary nucleotides at the position corresponding to the intended nucleotide edit, may be referred to as an “editing target sequence”. In some embodiments, the editing template has identity or substantial identity to a sequence on the target strand that is complementary to, or having the same position in the genome as, the editing target sequence, except for one or more insertions, deletions, or substitutions at the intended nucleotide edit positions. In some embodiments, the editing template encodes a single stranded DNA, wherein the single stranded DNA has identity or substantial identity to the editing target sequence except for one or more insertions, deletions, or substitutions at the positions of the one or more intended nucleotide edits.

### Spacers

[0144] A spacer may guide a prime editing complex to a genomic locus with identical or substantially identical sequence during prime editing. In some embodiments, the PEgRNA comprises a spacer. In some embodiments, the length of the spacer varies from at least 10 nucleotides to 100 nucleotides. For examples, a spacer may be at least 10 nucleotides, at least 11 nucleotides, at least 12 nucleotides, at least 13 nucleotides, at least 14 nucleotides, at least 15 nucleotides, at least 16 nucleotides, at least 17 nucleotides, at least 18 nucleotides, at least 19 nucleotides, at least 20 nucleotides, at least 30 nucleotides, at least 40 nucleotides, at least 50 nucleotides, at least 60 nucleotides, at least 70 nucleotides, at least 80 nucleotides, at least 90 nucleotides, at least 100 nucleotides. In some embodiments, the spacer is 16 nucleotides, 17 nucleotides, 18 nucleotides, 19 nucleotides, 20 nucleotides, 21 nucleotides, 22 nucleotides, 23 nucleotides, 24 nucleotides, or 25 nucleotides in length. In some embodiments, the spacer is from 15 nucleotides to 30 nucleotides in length, 15 to 25 nucleotides in length, 18 to 22 nucleotides in length, 10 to 20 nucleotides in length, 20 to 30 nucleotides in length, 30 to 40 nucleotides in length, 40 to 50 nucleotides in length, 50 to 60 nucleotides in length, 60 to 70 nucleotides in length, 70 to 80 nucleotides in length, or 90 nucleotides to 100 nucleotides in length. In some embodiments, the spacer is 20 nucleotides in length. In some embodiments, the spacer is 17 to 18 nucleotides in length.

[0145] In some embodiments, a spacer sequence comprises a region that has substantial complementarity to a search target sequence on the target strand of a double stranded target DNA. In some embodiments, the spacer sequence of a PEgRNA is identical or substantially identical to a protospacer sequence on the edit strand of the target gene (except that the protospacer sequence comprises thymine and the spacer sequence may comprise uracil). In some embodiments, the spacer sequence is at least about 70%, 75%, 80%, 85%, 90%, 95%, or 100% complementary to a search target sequence in the target gene. In some embodiments, the spacer comprises is substantially complementary to the search target sequence.

[0146] In some embodiments, the length of the spacer varies from at least 10 nucleotides to 100 nucleotides. For examples, a spacer may be at least 10 nucleotides, at least 11 nucleotides, at least 12 nucleotides, at least 13 nucleotides, at least 14 nucleotides, at least 15 nucleotides, at least 16 nucleotides, at least 17 nucleotides, at least 18 nucleotides, at least 19 nucleotides, at least 20 nucleotides, at least 30 nucleotides, at least 40 nucleotides, at least 50 nucleotides, at least 60 nucleotides, at least 70 nucleotides, at least 80 nucleotides, at least 90 nucleotides, at least 100 nucleotides. In some embodiments, the spacer is 16 nucleotides, 17 nucleotides, 18 nucleotides, 19 nucleotides, 20 nucleotides, 21 nucleotides, 22 nucleotides, 23 nucleotides, 24 nucleotides, or 25 nucleotides in length. In some embodiments, the spacer is from 15 nucleotides to 30 nucleotides in length, 15 to 25 nucleotides in length, 18 to 22 nucleotides in length, 10 to 20 nucleotides in length, 20 to 30 nucleotides in length, 30 to 40 nucleotides in length, 40 to 50 nucleotides in length, 50 to 60 nucleotides in length, 60 to 70 nucleotides in length, 70 to 80 nucleotides in length, or 90 nucleotides to 100 nucleotides in length. In some embodiments, the spacer is 20 nucleotides in length. In some embodiments, the spacer is 17 to 18 nucleotides in length.

[0147] As used herein in a PEgRNA or a nick guide RNA sequence, or fragments thereof such as a spacer, PBS, or RTT sequence, unless indicated otherwise, it should be appreciated that the letter “T” or “thymine” indicates a nucleobase in a DNA sequence that encodes the PEgRNA or guide RNA sequence, and is intended to refer to a uracil (U) nucleobase of the PEgRNA or guide RNA or any chemically modified uracil nucleobase known in the art, such as 5-methoxyuracil.

### Primer Binding Site (PBS)

[0148] A PEgRNA may comprise a primer binding site (PBS) and an editing template (e.g., an RTT). The extension arm of a PEgRNA may comprise a PBS and an editing template. In some embodiments, a PBS may be partially complementary to the spacer. In some embodiments, the editing template (e.g., RTT) is partially complementary to the spacer. In some embodiments, the editing template (e.g., RTT) and the primer binding site (PBS) are each partially complementary to the spacer.

[0149] An extension arm of a PEgRNA may comprise a primer binding site sequence (PBS, or PBS sequence) that hybridizes with a free 3′ end of a single stranded DNA in the target gene generated by nicking with a prime editor. The length of the PBS sequence may vary depending on, e.g., the prime editor components, the search target sequence and other components of the PEgRNA. In some embodiments, the length of the primer binding site (PBS) varies from at least 2 nucleotides to 50 nucleotides. For examples, a primer binding site (PBS) may be at least 2 nucleotides, at least 3 nucleotides, at least 4 nucleotides, at least 5 nucleotides, at least 6 nucleotides, at least 7 nucleotides, at least 8 nucleotides, at least 9 nucleotides, at least 10 nucleotides, at least 11 nucleotides, at least 12 nucleotides, at least 13 nucleotides, at least 14 nucleotides, at least 15 nucleotides, at least 16 nucleotides, at least 17 nucleotides, at least 18 nucleotides, at least 19 nucleotides, at least 20 nucleotides, at least 30 nucleotides, at least 40 nucleotides, or at least 50 nucleotides in length. In some embodiments, the PBS is at least 6 nucleotides in length. In some embodiments, the PBS is about 4 to 16 nucleotides, about 6 to 16 nucleotides, about 6 to 18 nucleotides, about 6 to 20 nucleotides, about 8 to 20 nucleotides, about 10 to 20 nucleotides, about 12 to 20 nucleotides, about 14 to 20 nucleotides, about 16 to 20 nucleotides, or about 18 to 20 nucleotides in length. In some embodiments, the PBS is about 7 to 15 nucleotides in length. In some embodiments, the PBS is 6, 7, 8, 9, 10, 11, 12, 13, 14, 15, 16, 17, 18, 19, or 20 nucleotides in length. In some embodiments, the PBS is 8, 9, 10, 11, 12, 13, or 14 nucleotides in length.

[0150] The PBS may be complementary or substantially complementary to a DNA sequence in the edit strand of the target gene. By annealing with the edit strand at a free hydroxy group, e.g., a free 3′ end generated by prime editor nicking, the PBS may initiate synthesis of a new single stranded DNA encoded by the editing template at the nick site. In some embodiments, the PBS is at least about 70%, 75%, 80%, 85%, 90%, 95%, or 100% complementary to a region of the edit strand of the target gene. In some embodiments, the PBS is perfectly complementary, or 100% complementary, to a region of the edit strand of the target gene.

[0151] An extension arm of a PEgRNA may comprise an editing template that serves as a DNA synthesis template for the DNA polymerase in a prime editor during prime editing.

[0152] The length of an editing template may vary depending on, e.g., the prime editor components, the search target sequence and other components of the PEgRNA. In some embodiments, the editing template serves as a DNA synthesis template for a reverse transcriptase, and the editing template is referred to as a reverse transcription editing template (RTT).

[0153] The editing template (e.g., RTT), in some embodiments, is 2, 3, 4, 5, 6, 7, 8, 9, 10, 11, 12, 13, 14, 15, 16, 17, 18, 19, 20, 21, 22, 23, 24, or 25 nucleotides in length. In some embodiments, the RTT is 12, 13, 14, 15, 16, 17, 18, 19, 20, 21, 22, 23, 24, or 25 nucleotides in length. In some embodiments, the RTT is 16, 17, 18, 19, 20, 21, 22, 23, 24, 25, 26, 27, 28, 29, 30, 31, 32, 33, 34, 35, 36, 37, 38, 39, or 40 nucleotides in length.

[0154] In some embodiments, the editing template (e.g., RTT) sequence is about 70%, 75%, 80%, 85%, 90%, 95%, or 99% complementary to the editing target sequence on the edit strand of the target gene. In some embodiments, the editing template sequence (e.g., RTT) is substantially complementary to the editing target sequence. In some embodiments, the editing template sequence (e.g., RTT) is complementary to the editing target sequence except at positions of the intended nucleotide edits to be incorporated into the target gene. In some embodiments, the editing template comprises a nucleotide sequence comprising about 85% to about 95% complementarity to an editing target sequence in the edit strand in the target gene. In some embodiments, the editing template comprises about 86%, about 87%, about 88%, about 89%, about 90%, about 91%, about 92%, about 93%, about 94%, about 95%, about 96%, about 97%, about 98%, or about 99% complementarity to an editing target sequence in the edit strand of the target gene.

[0155] In some embodiments, a PEgRNA includes only RNA nucleotides and forms an RNA polynucleotide. In some embodiments, a PEgRNA is a chimeric polynucleotide that includes both RNA and DNA nucleotides. For example, a PEgRNA can include DNA in the spacer sequence, the gRNA core, or the extension arm. In some embodiments, a PEgRNA comprises DNA in the spacer sequence. In some embodiments, the entire spacer sequence of a PEgRNA is a DNA sequence. In some embodiments, the PEgRNA comprises DNA in the gRNA core, for example, in a stem region of the gRNA core. In some embodiments, the PEgRNA comprises DNA in the extension arm, for example, in the editing template. An editing template that comprises a DNA sequence may serve as a DNA synthesis template for a DNA polymerase in a prime editor, for example, a DNA-dependent DNA polymerase. Accordingly, the PEgRNA may be a chimeric polynucleotide that comprises RNA in the spacer, gRNA core, and/or the PBS sequences and DNA in the editing template.

[0156] Components of a PEgRNA may be arranged in a modular fashion. In some embodiments, the spacer and the extension arm comprising a primer binding site sequence (PBS) and an editing template, e.g., a reverse transcriptase template (RTT), can be interchangeably located in the 5′ portion of the PEgRNA, the 3′ portion of the PEgRNA, or in the middle of the gRNA core. For example, in some embodiments, a PEgRNA comprises, from 5′ to 3′: a spacer, a gRNA core, an editing template, and a PBS. In some embodiments, a PEgRNA comprises, from 5′ to 3′: an editing template, a PBS, a spacer, and a gRNA core. In some embodiments, the PBS and/or the editing template is positioned within the gRNA core, i.e., flanked by a first half of the gRNA core and a second half of the gRNA core.

[0157] In certain embodiments, PEgRNAs provided herein comprise i) a spacer that comprises a region of complementarity to a search target sequence in target strand of a double stranded target DNA; ii) a guide RNA (gRNA) core comprising a direct repeat, a first stem loop, and a second stem loop; iii) an editing template that comprises an intended edit compared to the double stranded target DNA; and iv) a primer binding site (PBS) that comprises a region of complementarity to a region upstream of a nick site in a non-target strand of the double stranded target DNA, wherein the PEgRNA further comprises one or more nucleic acid moieties at its 3′ end.

[0158] In some embodiments, the PEgRNA comprises, in 5′ to 3′ order, the spacer, the gRNA core, the editing template, and the PBS.

[0159] In certain embodiments, PEgRNAs provided herein comprise i) a spacer that comprises a region of complementarity to a search target sequence in target strand of a double stranded target DNA; ii) a guide RNA (gRNA) core comprising a direct repeat, a first stem loop, and a second stem loop; iii) an editing template that comprises an intended edit compared to the double stranded target DNA; and iv) a primer binding site (PBS) that comprises a region of complementarity to a region upstream of a nick site in a non-target strand of the double stranded target DNA, wherein the gRNA core comprises one or more sequence modifications compared to SEQ ID NO. 16.

[0160] In some embodiments, the PEgRNA comprises, in 5′ to 3′ order, the spacer, the gRNA core, the editing template, and the PBS.

[0161] In certain embodiments, PEgRNAs provided herein comprise i) a spacer that comprises a region of complementarity to a search target sequence in target strand of a double stranded target DNA; ii) a guide RNA (gRNA) core comprising a direct repeat, a first stem loop, and a second stem loop; iii) an editing template that comprises an intended edit compared to the double stranded target DNA; and iv) a primer binding site (PBS) that comprises a region of complementarity to a region upstream of a nick site in a non-target strand of the double stranded target DNA, and v) a tag sequence that comprises a region of complementarity to the PBS and/or the editing template.

[0162] In some embodiments, the PEgRNA comprises, in 5′ to 3′ order, the spacer, the gRNA core, the editing template, the PBS, and the tag sequence.

[0163] In some embodiments, the PEgRNA comprises, in 5′ to 3′ order, the editing template, the PBS, the tag sequence, the spacer, and the gRNA core.

[0164] In certain embodiments, PEgRNAs provided herein comprise in 5′ to 3′ order: i) a spacer that comprises a region of complementarity to a search target sequence in target strand of a double stranded target DNA; ii) 5′ part of a guide RNA (gRNA) core; iii) an editing template that comprises an intended edit compared to the double stranded target DNA; iv) a primer binding site (PBS) that comprises a region of complementarity to a region upstream of a nick site in a non-target strand of the double stranded target DNA; and v) a 3′ part of a gRNA core. In some embodiments, the 5′ part of the gRNA core and the 3′ part of the gRNA core form a complete functional gRNA core that can associate with a programmable DNA binding protein of a prime editor, e.g., a Cas9 nickase. In some embodiments, the 5′ part of the gRNA core comprises a direct repeat, a first stem loop, and a 5′ half of a second stem loop. In some embodiments, the 3′ part of the gRNA core comprises a 3′ half of a second stem loop and a third stem loop. In some embodiments, the PEgRNA further comprises a tag sequence that comprises a region of complementarity to the PBS and/or the editing template.

[0165] In certain embodiments, PEgRNAs provided herein comprise: i) a first sequence comprising a spacer that comprises a region of complementarity to a search target sequence in target strand of a double stranded target DNA, and a first half of a gRNA core; and ii) a second sequence comprising a second half of the gRNA core, an editing template that comprises an intended edit compared to the double stranded target DNA; a primer binding site (PBS) that comprises a region of complementarity to a region upstream of a nick site in a non-target strand of the double stranded target DNA; and, wherein the gRNA core comprises a direct repeat, a first stem loop, and a second stem loop. In certain embodiments, PEgRNAs provided herein comprise i) a first sequence comprising an editing template that comprises an intended edit compared to the double stranded target DNA; a primer binding site (PBS) that comprises a region of complementarity to a region upstream of a nick site in a non-target strand of the double stranded target DNA; a spacer that comprises a region of complementarity to a search target sequence in target strand of a double stranded target DNA; and a first half of a gRNA core; and ii) a second sequence comprising a second half of a gRNA core, wherein the gRNA core comprises a direct repeat, a first stem loop, and a second stem loop. In some embodiments, the first half of the gRNA core comprises a direct repeat, a first stem loop, and a 5′ half of a second stem loop. In some embodiments, the second part of the gRNA core comprises a 3′ half of a second stem loop and a third stem loop. In some embodiments, the first half of the gRNA core comprises a first half of a direct repeat. In some embodiments, the second half of the gRNA core comprises a second half of a direct repeat, a first stem loop, a second stem loop, and a third stem loop.

[0166] In some embodiments, the first sequence is on a first molecule and the second sequence is on a second molecule.

[0167] In some embodiments, the first sequence and the second sequence are on the same molecule.

[0168] In some embodiments, the first half of the gRNA core and the second half of the gRNA core are selected from the paired first half gRNA core sequences and second half gRNA sequences provided in Table 2.

[0169] Provided herein in some embodiments are example sequences for PEgRNA spacers, PBS, RTT, and ngRNA spacers for a prime editing system comprising a nuclease that recognizes the PAM sequence “NGG.” In some embodiments, a PAM motif on the edit strand comprises an “NGG” motif, wherein N is any nucleotide. In some embodiments, a PEgRNA of this disclosure is part of a prime editing system that recognizes the PAM motif CGG. In some embodiments, a PEgRNA of this disclosure is part of a prime editing system that recognizes the PAM motif AGG.

Modified gRNA Cores

[0170] In some embodiments, a gRNA core of a PEgRNA associates with a programmable DNA binding domain in a prime editor. In some embodiments, the gRNA core comprises a direct repeat, a first stem loop, and a second stem loop. In some embodiments, the gRNA core further comprises a third stem loop. A guide RNA core (also referred to herein as the gRNA core, gRNA scaffold, or gRNA backbone sequence) of a PEgRNA may contain a polynucleotide sequence that binds to a DNA binding domain (e.g., Cas9) of a prime editor. The gRNA core may interact with a prime editor as described herein, for example, by association with a DNA binding domain, such as a DNA nickase of the prime editor.

[0171] One of skill in the art will recognize that different prime editors having different DNA binding domains from different DNA binding proteins may require different gRNA core sequences specific to the DNA binding protein. In some embodiments, the gRNA core is capable of binding to a Cas9-based prime editor. In some embodiments, the gRNA core is capable of binding to a Cpf1-based prime editor. In some embodiments, the gRNA core is capable of binding to a Cas12b-based prime editor.

[0172] In some embodiments, the gRNA core comprises regions and secondary structures involved in binding with specific CRISPR Cas proteins. For example, in a Cas9 based prime editing system, the gRNA core of a PEgRNA may comprise one or more regions of a basepaired regions. In some embodiments, a gRNA core capable of binding to a Cas9 comprises, from 5′ to 3′: a repeat sequence, a loop structure, an antirepeat sequence, a first stem loop, a second stem loop, and a third stem loop. An exemplary structure of the gRNA core is shown in FIG. 8; the sequence in FIG. 8 is the canonical SpCas9 sgRNA scaffold. As used herein, a repeat sequence and an antirepeat sequence refer to the nucleic acid secondary structure formed by the direct repeat region, formed by basepairing between sequences equivalent to the crRNA and tracrRNA of a Cas9 guide RNA. The repeat sequence and the antirepeat sequence may be connected by a loop structure, and the secondary structure formed by basepairing between the repeat and antirepeat sequence may be referred to as the direct repeat region (alternatively, the repeat, antirepeat, and the connecting loop structure may be referred to as the tetraloop). In some embodiments, the direct repeat region of the gRNA core comprises one or more basepaired regions: a basepaired “lower stem” (G1 to A6 and U25 to U30 in FIG. 8) adjacent to the spacer sequence and a basepaired “upper stem” (G9 to A12 and U17 to C20 in FIG. 8) following the lower stem, where the lower stem and upper stem may be connected by a “bulge” comprising unpaired RNAs. As used herein, positions of alterations to the gRNA core may be referred to in the context of the secondary structure of the gRNA core. For example, a “first basepair in the direct repeat (or lower stem)” refers to the basepair between the 5′ most nucleotide in the repeat sequence and the complementary nucleotide that is the 3′ most nucleotide in the antirepeat sequence (G1 and A30 in FIG. 8), and a “second basepair in the direct repeat (or lower stem)” refers to the basepair between the second 5′ most nucleotide in the repeat sequence and the complementary nucleotide in the antirepeat sequence (U2 and A29 in FIG. 8). Similarly, the “start” or “beginning” basepair of a second stem loop refers to the basepair formed between the 5′ most nucleotide in the second stem loop and the complementary nucleotide in the complementary portion of the second stem loop (A49 and U60 in FIG. 8). The “end” or “last” basepair of a second stem loop refers to, wherein the second stem loop is formed by basepairing of a 5′ portion of the stem and a 3′ portion of the stem connected by a loop, the basepair formed between the 3′ most nucleotide in the 5′ portion of the stem and the complementary nucleotide in the complementary 3′ portion of the stem (U52 and A57 in FIG. 8).

[0173] The gRNA core may further comprise, 3′ to the direct repeat, a first stem loop, a second stem loop, and a third stem loop. In some embodiments, the gRNA core may comprise a direct repeat, and at least one, at least two, or at least three stem loops. As used herein, a stem loop (or a hairpin loop) is basepairing pattern that can occur in single-stranded nucleic acids. In some embodiments, a stem loop may be formed when two regions of the same nucleic acid strand are at least partially complementary in nucleotide sequence when read in opposite directions, therefore, the base-pairs can form a double helix that comprises an unpaired loop. Stem loops within a gRNA core described herein may be numbered starting from the 5′ to the 3′ end of the gRNA core. For example, the “first stem loop” would be the first stem loop (not including any direct repeats) at the 5′ end proximal to the direct repeat of the gRNA core sequence. A “second stem loop” would be the second stem loop (not including any direct repeats) following the first stem loop in a 5′ to 3′ direction, and so on.

[0174] In some embodiments, the gRNA core comprises nucleotide alterations as compared to a wild type gRNA core, e.g., a canonical SpCas9 gRNA scaffold as set forth in SEQ ID NO: 16. For example, in some embodiments, one or more nucleotides in the gRNA core is deleted, inserted, and/or substituted as compared to a canonical SpCas9 gRNA scaffold as set forth in SEQ ID NO: 16. In some embodiments, the gRNA core of a PEgRNA is capable of binding to a Cas9 (e.g. nCas9) in a prime editor, and comprise one or more nucleotide alterations or modifications as compared to a wild type CRISPR-Cas9 guide RNA scaffold, e.g., a canonical SpCas9 gRNA scaffold as set forth in SEQ ID NO: 16. In some embodiments, the gRNA core comprises one or more nucleotide insertions, deletions, and/or substitutions in the direct repeat as compared to a canonical SpCas9 gRNA scaffold as set forth in SEQ ID NO: 16. Potential advantages associated with such modified gRNA cores may include improved prime editing efficiency and/or improved manufacturing via a split synthesis scheme.

[0175] In some embodiments, the gRNA core comprises one or more nucleotide insertions, deletions, and/or substitutions in the lower stem or upper stem of the direct repeat. In some embodiments, the gRNA core comprises one or more nucleotide substitutions in the lower stem of the direct repeat. In some embodiments, the gRNA core comprises one or more nucleotide insertions in the upper stem of the direct repeat. In some embodiments, the gRNA core comprises one or more nucleotide insertions, deletions, and/or substitutions in the first stem loop as compared to a canonical SpCas9 gRNA scaffold as set forth in SEQ ID NO: 16. In some embodiments, the gRNA core comprises one or more nucleotide insertions, deletions, and/or substitutions in the second stem loop as compared to a canonical SpCas9 gRNA scaffold as set forth in SEQ ID NO: 16. In some embodiments, the gRNA core comprises one or more nucleotide insertions in the second stem loop. In some embodiments, the gRNA core comprises one or more nucleotide insertions, deletions, and/or substitutions in the third stem loop as compared to a canonical SpCas9 gRNA scaffold as set forth in SEQ ID NO: 16. In some embodiments, the gRNA core comprises one or more nucleotide insertions, deletions, and/or substitutions as compared to a wild type CRISPR-Cas9 guide RNA scaffold, e.g., a canonical SpCas9 gRNA scaffold as set forth in SEQ ID NO: 16, and comprises a third stem loop that has the same sequence as the third stem loop of the wild type CRISPR-Cas9 guide RNA scaffold.

[0176] In some embodiments, RNA nucleotides in the lower stem, upper stem, an/or the stem loop regions may be replaced with one or more DNA sequences. In some embodiments, the gRNA core comprises unmodified or wild type RNA sequences in the nexus and/or the bulge regions. In some embodiments, the gRNA core does not include long stretches of A-U pairs, for example, a GUUUU-AAAAC pairing element. Exemplary gRNA core structures are shown in FIG. 8 and FIG. 12.

[0177] In some embodiments, the PEgRNA comprises a guide RNA (gRNA) core that associates with a DNA binding domain, e.g., a CRISPR-Cas protein domain, of a prime editor. In some embodiments, the PEgRNA comprises a guide RNA (gRNA) core that associates with a DNA binding domain, e.g., a Cas9 domain, of a prime editor. In certain aspects, the gRNA core of the PEgRNAs provided herein comprises one or more sequence modifications compared to SEQ ID NO. 16. In some embodiments, the one or more (e.g., two or more, three or more, four or more, or five or more) sequence modifications comprises a gRNA core difference set forth in Table 1 or Table 2. In some embodiments, the gRNA core comprises a sequence selected from SEQ ID NOs: 16-61. In some embodiments, the gRNA core comprises a first gRNA core sequence comprising a 5′ half of the gRNA core and a second gRNA core sequence comprising a 3′ half of the gRNA core, and wherein the PEgRNA comprises, in 5′ to 3′ order: the spacer, the first gRNA core sequence, the editing template, the PBS, the tag sequence, and the second gRNA core sequence. The 5′half and the 3′half can form a functional gRNA core for association/binding with a programmable DNA binding protein, e.g., a Cas protein. One of skill in the art will recognize that different prime editors having different DNA binding domains from different DNA binding proteins may require different gRNA core sequences specific to the DNA binding protein. In some embodiments, the gRNA core is capable of binding to a Cas9-based prime editor. In some embodiments, the gRNA core is capable of binding to a Cpf1-based prime editor. In some embodiments, the gRNA core is capable of binding to a Cas12b-based prime editor.

[0178] In some embodiments, the gRNA core of the PEgRNAs provided herein comprises one or more sequence modifications compared to SEQ ID NO. 16. In some embodiments, the one or more sequence modifications comprises a gRNA core alteration compared to SEQ ID No.: 16 set forth in Table 1. In some embodiments, the gRNA core comprises a gRNA core sequence set forth in Table 1 or Table 2.

[0179] In some embodiments, the one or more sequence modifications comprises a sequence modification in the direct repeat. In some embodiments, sequence modification in the gRNA core of a PEgRNA comprises one or more nucleotide flips. As used herein, the term “flip” refers to the modification of a sequence such that nucleotide bases that that base-pair with each other in the stem of a loop or hairpin structure are exchanged for each other. For example, an original unmodified stem structure may comprise an A/U basepair, with A in a first strand (or region) and U in the complementary strand (or region) of the stem structure. An A/U to U/A basepair flip substitutes the Adenosine in the first strand (or region) with a Uracil and substitutes the Uracil in the complementary strand (or region) with an Adenosine, thereby “flipping” the A/U basepair to an U/A basepair. In some embodiments, a flip of nucleotides can be used, for example, to break-up sequences containing repeats of the same base (for example sequences of at least 3, 4, 5, 6, or 7 consecutive A nucleotides, U nucleotides, C nucleotides, or G nucleotides) present in a nucleic acid molecule without disrupting its secondary structure. An example of an A/U flip that breaks-up a series of 4 consecutive A nucleotides and U nucleotides at the fourth position in the lower stem of a direct repeat without disrupting the gRNA core's secondary structure is illustrated in FIG. 12. In some embodiments, instead of a flip, the original basepair is replaced with an alternative basepair (e.g., an A/U basepair is replaced with a C/G or G/C basepair).

[0180] In some embodiments, the direct repeat of the gRNA core may comprise at least one flip of an A-U basepair in a lower stem of the direct repeat, optionally wherein the lower stem does not contain 2, 3, 4, or more contiguous A-U basepairs; and/or at least one flip of an A/U basepair in the direct repeat comprises a flip of the fourth A/U basepair in the lower stem of the direct repeat.

[0181] In some embodiments, the sequence modification in the direct repeat comprises insertion of one or more nucleotides in the upper stem of the direct repeat of the gRNA core, thereby resulting in an extension of the upper stem as compared to a wild type gRNA core, e.g., as set forth in SEQ ID NO: 16. The extension in the upper stem may be from 1, 2, 3, 4, 5, 6, 7, 8, 9, 10, 11, 12, 13, 14, 15, or 16 basepairs. In some embodiments, the gRNA core comprises a sequence selected from SEQ ID NOs: 26-37.

[0182] In some embodiments, the one or more sequence modifications comprises a sequence modification in the second stem loop.

[0183] In some embodiments, the modification in the second stem loop comprises a flip of a G/C basepair. In some embodiments, the modification in the second stem loop comprises a flip of an A/U basepair in the second stem loop. In some embodiments, the modification in the second stem loop comprises substitution of a A/U basepair with a G/C basepair. In some embodiments, the modification in the second stem loop comprises substitution of a U/A basepair with a G/C basepair. In some embodiments, the modification in the second stem loop comprises substitution of a A/U basepair with a G/C basepair, and further comprises a substitution of a U/A basepair with a G/C basepair. In some embodiments, the gRNA core comprises a nucleic acid sequence selected from SEQ ID NOs: 21, 22 or 25.

[0184] Exemplary gRNA core sequences and sequence modifications are shown in Table 1 and Table 2. In some embodiments, the gRNA core comprises a sequence selected from SEQ ID NOs: 16-61, 3860-4359, and 4452.

[0185] In some embodiments, the one or more sequence modifications comprises a modification in a third stem loop of the gRNA core. In some embodiments, the modification in the third stem loop comprises a flip of a G/C basepair. In some embodiments, the modification in the third stem loop comprises a flip of an A/U basepair.

[0186] The gRNA core may comprise any one of modifications described in Table 1 or Table 2, or any combination thereof.

[0187] In some embodiments, the gRNA core has a flipped 1st A-U basepair in the direct repeat. In some embodiments, the gRNA core has a flipped 2nd A-U base in the direct repeat. In some embodiments, the gRNA core has a flipped 3rd A-U basepair in the direct repeat. In some embodiments, the gRNA core has a flipped 4th A-U basepair in the direct repeat.

[0188] In some embodiments, the gRNA core comprises a substitution of an A-U basepair (bp) with a G-C Bp at the fourth basepair of the second stem loop. In some embodiments, the gRNA core comprises a substitution of an A-U Bp with a C-G Bp at the fourth basepair of second stem loop.

[0189] In some embodiments, the gRNA core comprises a five basepair extension of the upper stem of the direct repeat (tgctg and cagca). In some embodiments, the gRNA has a “flip and extension” (M4 and E5), as described in Nelson, J. W., Randolph, P. B., Shen, S. P. et al. Engineered pegRNAs improve prime editing efficiency. Nat Biotechnol (2021). The M4 modification is flipping the 4th A-U basepair in the direct repeat of gRNA core. The E5 modification is extending the end of the upper stem of the direct repeat with a five bp sequence (tgctg and cagca).

[0190] In some embodiments, a gRNA core comprises a M4 modification. In some embodiments, a gRNA core comprises a E5 modification. In some embodiments, a gRNA core comprises a M4 modification and a E5 modification.

[0191] In some embodiments, a gRNA core comprises a substitution of a A/U basepair with a G/C basepair in the second stem loop. In some embodiments, the gRNA core comprises a substitution of a A/U basepair with a G/C basepair at the first basepair of the second stem loop.

[0192] In some embodiments, the gRNA core has a 1 basepair extension in the upper stem of the direct repeat sequence (c and g). In some embodiments, the gRNA core has a 2 basepair extension in the upper stem of the direct repeat sequence (cc and gg). In some embodiments, the gRNA core has a 2 basepair extension in the upper stem of the direct repeat sequence (ca and tg). In some embodiments, the gRNA core has a 2 basepair extension in the upper stem of the direct repeat sequence (cg and tg). In some embodiments, the gRNA core has a 1 basepair extension in the upper stem of the direct repeat sequence (a and t). In some embodiments, the gRNA core has a 2 basepair extension in the upper stem of the direct repeat sequence (ac and gt). In some embodiments, the gRNA core has a 2 basepair extension in the upper stem of the direct repeat sequence (aa and tt). In some embodiments, the gRNA core has a 2 basepair extension in the upper stem of the direct repeat sequence (ag and tt). In some embodiments, the gRNA core has a 3 basepair extension in the upper stem of the direct repeat sequence (ccc and ggg). In some embodiments, the gRNA core has a 4 basepair extension in the upper stem of the direct repeat sequence (ccac and gtgg). In some embodiments, the gRNA core has a 5 basepair extension in the upper stem of the direct repeat sequence (ccaac and gttgg). In some embodiments, the gRNA core has a 6 basepair extension in the upper stem of the direct repeat sequence (ccacac and gtgtgg).

[0193] In some embodiments, the gRNA core has a 1 basepair extension in the second stem loop sequence (c and g). In some embodiments, the gRNA core has a 2 basepair extension in the second stem loop sequence (cc and gg). In some embodiments, the gRNA core has a 2 basepair extension in the second stem loop sequence (ca and tg). In some embodiments, the gRNA core has a 2 basepair extension in the second stem loop sequence (cg and tg). In some embodiments, the gRNA core has a 1 basepair extension in the second stem loop sequence (a and t). In some embodiments, the gRNA core has a 2 basepair extension in the second stem loop sequence (ac and gt). In some embodiments, the gRNA core has a 2 basepair extension in the second stem loop sequence (aa and tt). In some embodiments, the gRNA core has a 2 basepair extension in the second stem loop sequence (ag and tt). In some embodiments, the gRNA core has a 3 basepair extension in the second stem loop sequence (ccc and ggg). In some embodiments, the gRNA core has a 4 basepair extension in the second stem loop sequence (ccac and gtgg). In some embodiments, the gRNA core has a 5 basepair extension in the second stem loop sequence (ccaac and gttgg). In some embodiments, the gRNA core has a 6 basepair extension in the second stem loop sequence (ccacac and gtgtgg).

[0194] In some embodiments, the gRNA core has a 1 basepair extension in the third stem loop sequence (c and g). In some embodiments, the gRNA core has a 2 basepair extension in the third stem loop sequence (cc and gg). In some embodiments, the gRNA core has a 2 basepair extension in the third stem loop sequence (ca and tg). In some embodiments, the gRNA core has a 2 basepair extension in the third stem loop sequence (cg and tg). In some embodiments, the gRNA core has a 1 basepair extension in the third stem loop sequence (a and t). In some embodiments, the gRNA core has a 2 basepair extension in the third stem loop sequence (ac and gt). In some embodiments, the gRNA core has a 2 basepair extension in the third stem loop sequence (aa and tt). In some embodiments, the gRNA core has a 2 basepair extension in the third stem loop sequence (ag and tt). In some embodiments, the gRNA core has a 3 basepair extension in the third stem loop sequence (ccc and ggg). In some embodiments, the gRNA core has a 4 basepair extension in the third stem loop sequence (ccac and gtgg). In some embodiments, the gRNA core has a 5 basepair extension in the third stem loop sequence (ccaac and gttgg). In some embodiments, the gRNA core has a 6 basepair extension in the third stem loop sequence (ccacac and gtgtgg).

[0195] In some embodiments, as compared to editing efficiency with a control PEgRNA having a gRNA core without modifications, a gRNA core modification increase efficiency of editing by at least 10%, at least 20%, at least 30%, at least 40%, at least 50%, at least 60%, at least 70%, at least 80%, at least 90%, at least 100%, at least 110%, at least 120%, at least 130%, at least 140%, at least 150%, at least 160%, at least 170%, at least 180%, at least 190%, at least 200%. Exemplary nucleotide sequence modifications in the gRNA core of a PEgRNA are provided in Table 1. Modifications compared to a canonical SpCas9 gRNA scaffold sequence are indicated in the third column (“Modification description”). Although gRNA core sequences provided in Table 1 are RNA sequences. “T” is used instead of “U” in the sequences for consistency with the ST.26 standard.

TABLE 1
Exemplary gRNA Core Sequences

| SEQ | | | |
|---|---|---|---|
| ID | gRNA Core | | |
| NO. | name | Modification description | gRNA core sequence |
| 16 | Canonical | none | GTTTTAGAGCTAGAAATAGCAA |
| | SpCas9 gRNA | | GTTAAAATAAGGCTAGTCCGTT |
| | core | | ATCAACTTGAAAAAGTGGCACC |
| | | | GAGTCGGTGC |
| 17 | M1 | Flipping the 1st A-U Basepair | GATTTAGAGCTAGAAATAGCAA |
| | | at the beginning of tetraloop | GTTAAATTAAGGCTAGTCCGTT |
| | | (U to A substitution at | ATCAACTTGAAAAAGTGGCACC |
| | | nucleotide 2; A to U | GAGTCGGTGC |
| | | substitution at nucleoitde 29) | |
| 18 | M2 | Flipping the 2nd A-U Basepair | GTATTAGAGCTAGAAATAGCAA |
| | | at the beginning of tetraloop | GTTAATATAAGGCTAGTCCGTT |
| | | (U to A substitution at | ATCAACTTGAAAAAGTGGCACC |
| | | nucleotide 3; A to U | GAGTCGGTGC |
| | | substitution at nucleoitde 28) | |
| 19 | M3 | Flipping the 3rd A-U Basepair | GTTATAGAGCTAGAAATAGCAA |
| | | at the beginning of tetraloop | GTTATAATAAGGCTAGTCCGTT |
| | | (U to A substitution at | ATCAACTTGAAAAAGTGGCACC |
| | | nucleotide 4; A to U | GAGTCGGTGC |
| | | substitution at nucleoitde 27) | |
| 20 | M4 | Flipping the 4th A-T Basepair | GTTTAAGAGCTAGAAATAGCAA |
| | | at the beginning of tetraloop | GTTTAAATAAGGCTAGTCCGTT |
| | | (U to A substitution at | ATCAACTTGAAAAAGTGGCACC |
| | | nucleotide 5; A to U | GAGTCGGTGC |
| | | substitution at nucleoitde 26) | |
| 21 | sl2 gc | Converting an A-U basepair to | GTTTTAGAGCTAGAAATAGCAA |
| | | a G-C basepair at the Fourth | GTTAAAATAAGGCTAGTCCGTT |
| | | Basepair of StemLoop2 (U to | ATCAACTGGAAACAGTGGCACC |
| | | G substitution at nucleotide | GAGTCGGTGC |
| | | 52; A to C substitution at | |
| | | nucleotide 57) | |
| 22 | sl2 cg | converting an A-U basepair to | GTTTTAGAGCTAGAAATAGCAA |
| | | a C-G basepair at the Fourth | GTTAAAATAAGGCTAGTCCGTT |
| | | Basepair of StemLoop2 (U to | ATCAACTCGAAAGAGTGGCACC |
| | | C substitution at nucleotide | GAGTCGGTGC |
| | | 52; A to G substitution at | |
| | | nucleotide 57) | |
| 23 | E5 | 5 basepair insertion in | GTTTTAGAGCTATGCTGGAAAC |
| | | tetraloop upper stem (UGCUG | AGCATAGCAAGTTAAAATAAG |
| | | between nucleotides 12 and | GCTAGTCCGTTATCAACTTGAA |
| | | 13; CAGCA between | AAAGTGGCACCGAGTCGGTGC |
| | | nucleotides 16 and 17) | |
| 24 | F + E | M4 and E5 | GTTTAAGAGCTATGCTGGAAAC |
| | | | AGCATAGCAAGTTTAAATAAGG |
| | | | CTAGTCCGTTATCAACTTGAAA |
| | | | AAGTGGCACCGAGTCGGTGC |
| 25 | sl2_flip | M4 and conversion of an A-U | GTTTAAGAGCTAGAAATAGCAA |
| | | basepair to a G-C pair at the | GTTTAAATAAGGCTAGTCCGTT |
| | | first basepair of StemLoop2 | ATCAGCGTGAAAACGCGGCAC |
| | | (A to G substitution at | CGAGTCGGTGC |
| | | nucleotide 49; U to G | |
| | | substitution at nucleotide 51; | |
| | | A to C substitution at | |
| | | nucleotide 58, U to C | |
| | | substitution at nucleotide 60) | |
| 26 | TetraLoop_L0 | M4 and extension at the start | GTTTAAGAGCTACGAAAGTAGC |
| | | of tetraloop with 1 Basepair | AAGTTTAAATAAGGCTAGTCCG |
| | | (insertion of C between | TTATCAACTTGAAAAAGTGGCA |
| | | nucleotides 12 and 13, | CCGAGTCGGTGC |
| | | insertion of G between | |
| | | nucleotides 16 and 17) | |
| 27 | TetraLoop_L1 | M4 and extension at the start | GTTTAAGAGCTACCGAAAGGTA |
| | | of tetraloop with 2 Basepair | GCAAGTTTAAATAAGGCTAGTC |
| | | (insertion of CC between | CGTTATCAACTTGAAAAAGTGG |
| | | nucleotides 12 and 13, | CACCGAGTCGGTGC |
| | | insertion of GG between | |
| | | nucleotides 16 and 17) | |
| 28 | TetraLoop_L2 | M4 and extension at the start | GTTTAAGAGCTACAGAAATGTA |
| | | of tetraloop with 2 Basepair | GCAAGTTTAAATAAGGCTAGTC |
| | | (insertion of CA between | CGTTATCAACTTGAAAAAGTGG |
| | | nucleotides 12 and 13, | CACCGAGTCGGTGC |
| | | insertion of UG between | |
| | | nucleotides 16 and 17) | |
| 29 | TetraLoop_L3 | M4 and extension at the start | GTTTAAGAGCTACGGAAATGTA |
| | | of tetraloop with 2 Basepair | GCAAGTTTAAATAAGGCTAGTC |
| | | (insertion of CG between | CGTTATCAACTTGAAAAAGTGG |
| | | nucleotides 12 and 13, | CACCGAGTCGGTGC |
| | | insertion of UG between | |
| | | nucleotides 16 and 17) | |
| 30 | TetraLoop_L4 | M4 and extension at the start | GTTTAAGAGCTAAGAAATTAGC |
| | | of tetraloop with 1 Basepair | AAGTTTAAATAAGGCTAGTCCG |
| | | (insertion of A between | TTATCAACTTGAAAAAGTGGCA |
| | | nucleotides 12 and 13, | CCGAGTCGGTGC |
| | | insertion of U between | |
| | | nucleotides 16 and 17) | |
| 31 | TetraLoop_L5 | M4 and extension at the start | GTTTAAGAGCTAACGAAAGTTA |
| | | of tetraloop with 2 Basepair | GCAAGTTTAAATAAGGCTAGTC |
| | | (insertion of AC between | CGTTATCAACTTGAAAAAGTGG |
| | | nucleotides 12 and 13, | CACCGAGTCGGTGC |
| | | insertion of GU between | |
| | | nucleotides 16 and 17) | |
| 32 | TetraLoop_L6 | M4 and extension at the start | GTTTAAGAGCTAAAGAAATTTA |
| | | of tetraloop with 2 Basepair | GCAAGTTTAAATAAGGCTAGTC |
| | | (insertion of AA between | CGTTATCAACTTGAAAAAGTGG |
| | | nucleotides 12 and 13, | CACCGAGTCGGTGC |
| | | insertion of UU between | |
| | | nucleotides 16 and 17) | |
| 33 | TetraLoop_L7 | M4 and extension at the start | GTTTAAGAGCTAAGGAAATTTA |
| | | of tetraloop with 2 Basepair | GCAAGTTTAAATAAGGCTAGTC |
| | | (insertion of AG between | CGTTATCAACTTGAAAAAGTGG |
| | | nucleotides 12 and 13, | CACCGAGTCGGTGC |
| | | insertion of UU between | |
| | | nucleotides 16 and 17) | |
| 34 | TetraLoop_L8 | M4 and extension at the start | GTTTAAGAGCTACCCGAAAGG |
| | | of tetraloop with 3 Basepair | GTAGCAAGTTTAAATAAGGCTA |
| | | (insertion of CCC between | GTCCGTTATCAACTTGAAAAAG |
| | | nucleotides 12 and 13, | TGGCACCGAGTCGGTGC |
| | | insertion of GGG between | |
| | | nucleotides 16 and 17) | |
| 35 | TetraLoop_L9 | M4 and extension at the start | GTTTAAGAGCTACCACGAAAGT |
| | | of tetraloop with 4 Basepair | GGTAGCAAGTTTAAATAAGGCT |
| | | (insertion of CCAC between | AGTCCGTTATCAACTTGAAAAA |
| | | nucleotides 12 and 13, | GTGGCACCGAGTCGGTGC |
| | | insertion of GUGG between | |
| | | nucleotides 16 and 17) | |
| 36 | TetraLoop_L10 | M4 and extension at the start | GTTTAAGAGCTACCAACGAAAG |
| | | of tetraloop with 5 Basepair | TTGGTAGCAAGTTTAAATAAGG |
| | | (insertion of CCAAC between | CTAGTCCGTTATCAACTTGAAA |
| | | nucleotides 12 and 13, | AAGTGGCACCGAGTCGGTGC |
| | | insertion of GUUGG between | |
| | | nucleotides 16 and 17) | |
| 37 | TetraLoop_L11 | M4 and extension at the start | GTTTAAGAGCTACCACACGAAA |
| | | of tetraloop with 6 Basepair | GTGTGGTAGCAAGTTTAAATAA |
| | | (insertion of CCACAC | GGCTAGTCCGTTATCAACTTGA |
| | | between nucleotides 12 and | AAAAGTGGCACCGAGTCGGTG |
| | | 13, insertion of GUGUGG | C |
| | | between nucleotides 16 and | |
| | | 17) | |
| 38 | Loop2_L0 | M4 and extension at the start | GTTTAAGAGCTAGAAATAGCAA |
| | | of stem loop 2 with 1 basepair | GTTTAAATAAGGCTAGTCCGTT |
| | | (insertion of C between | ATCAACTTCGAAAGAAGTGGCA |
| | | nucleotides 52 and 53; | CCGAGTCGGTGC |
| | | insertion of G between | |
| | | nucletoides 56 and 57) | |
| 39 | Loop2_L1 | M4 and extension at the start | GTTTAAGAGCTAGAAATAGCAA |
| | | of stem loop 2 with 2 basepair | GTTTAAATAAGGCTAGTCCGTT |
| | | (insertion of CC between | ATCAACTTCCGAAAGGAAGTGG |
| | | nucleotides 52 and 53; | CACCGAGTCGGTGC |
| | | insertion of GG between | |
| | | nucletoides 56 and 57) | |
| 40 | Loop2_L2 | M4 and extension at the start | GTTTAAGAGCTAGAAATAGCAA |
| | | of stem loop 2 with 2 basepair | GTTTAAATAAGGCTAGTCCGTT |
| | | (insertion of CA between | ATCAACTTCAGAAATGAAGTGG |
| | | nucleotides 52 and 53; | CACCGAGTCGGTGC |
| | | insertion of UG between | |
| | | nucletoides 56 and 57) | |
| 41 | Loop2_L3 | M4 and extension at the start | GTTTAAGAGCTAGAAATAGCAA |
| | | of stem loop 2 with 2 basepair | GTTTAAATAAGGCTAGTCCGTT |
| | | (insertion of CG between | |
| | | nucleotides 52 and 53; | |
| | | insertion of UG between | ATCAACTTCGGAAATGAAGTGG |
| | | nucletoides 56 and 57) | CACCGAGTCGGTGC |
| 42 | Loop2_L4 | M4 and extension at the start | GTTTAAGAGCTAGAAATAGCAA |
| | | of stem loop 2 with 1 basepair | GTTTAAATAAGGCTAGTCCGTT |
| | | (insertion of A between | ATCAACTTAGAAATAAGTGGCA |
| | | nucleotides 52 and 53; | CCGAGTCGGTGC |
| | | insertion of U between | |
| | | nucletoides 56 and 57) | |
| 43 | Loop2_L5 | M4 and extension at the start | GTTTAAGAGCTAGAAATAGCAA |
| | | of stem loop 2 with 2 basepair | GTTTAAATAAGGCTAGTCCGTT |
| | | (insertion of AC between | ATCAACTTACGAAAGTAAGTGG |
| | | nucleotides 52 and 53; | CACCGAGTCGGTGC |
| | | insertion of GU between | |
| | | nucletoides 56 and 57) | |
| 44 | Loop2_L6 | M4 and extension at the start | GTTTAAGAGCTAGAAATAGCAA |
| | | of stem loop 2 with 2 basepair | GTTTAAATAAGGCTAGTCCGTT |
| | | (insertion of AA between | ATCAACTTAAGAAATTAAGTGG |
| | | nucleotides 52 and 53; | CACCGAGTCGGTGC |
| | | insertion of UU between | |
| | | nucletoides 56 and 57) | |
| 45 | Loop2_L7 | M4 and extension at the start | GTTTAAGAGCTAGAAATAGCAA |
| | | of stem loop 2 with 2 basepair | GTTTAAATAAGGCTAGTCCGTT |
| | | (insertion of AG between | ATCAACTTAGGAAATTAAGTGG |
| | | nucleotides 52 and 53; | CACCGAGTCGGTGC |
| | | insertion of UU between | |
| | | nucletoides 56 and 57) | |
| 46 | Loop2_L8 | M4 and extension at the start | GTTTAAGAGCTAGAAATAGCAA |
| | | of stem loop 2 with 3 basepair | GTTTAAATAAGGCTAGTCCGTT |
| | | (insertion of CCC between | ATCAACTTCCCGAAAGGGAAGT |
| | | nucleotides 52 and 53; | GGCACCGAGTCGGTGC |
| | | insertion of GGG between | |
| | | nucletoides 56 and 57) | |
| 47 | Loop2_L9 | M4 and extension at the start | GTTTAAGAGCTAGAAATAGCAA |
| | | of stem loop 2 with 4 basepair | GTTTAAATAAGGCTAGTCCGTT |
| | | (insertion of CCAC between | ATCAACTTCCACGAAAGTGGAA |
| | | nucleotides 52 and 53; | GTGGCACCGAGTCGGTGC |
| | | insertion of GUGG between | |
| | | nucletoides 56 and 57) | |
| 48 | Loop2_L10 | M4 and extension at the start | GTTTAAGAGCTAGAAATAGCAA |
| | | of stem loop 2 with 5 basepair | GTTTAAATAAGGCTAGTCCGTT |
| | | (insertion of CCAAC between | ATCAACTTCCAACGAAAGTTGG |
| | | nucleotides 52 and 53; | AAGTGGCACCGAGTCGGTGC |
| | | insertion of GUUGG between | |
| | | nucletoides 56 and 57) | |
| 49 | Loop2_L11 | M4 and extension at the start | GTTTAAGAGCTAGAAATAGCAA |
| | | of stem loop 2 with 6 basepair | GTTTAAATAAGGCTAGTCCGTT |
| | | (insertion of CCACAC | ATCAACTTCCACACGAAAGTGT |
| | | between nucleotides 52 and | GGAAGTGGCACCGAGTCGGTG |
| | | 53; insertion of GUGUGG | C |
| | | between nucletoides 56 and | |
| | | 57) | |
| 50 | Loop3_L0 | M4 and Extension at the start | GTTTAAGAGCTAGAAATAGCAA |
| | | of Stem Loop3 with a 1 | GTTTAAATAAGGCTAGTCCGTT |
| | | Basepair sequence (c and g) | |
| | | | ATCAACTTGAAAAAGTGGCACC |
| | | | GCAGTGCGGTGC |
| 51 | Loop3_L1 | M4 and Extension at the start | GTTTAAGAGCTAGAAATAGCAA |
| | | of stem loop3 with a 2 | GTTTAAATAAGGCTAGTCCGTT |
| | | Basepair sequence (cc and gg) | ATCAACTTGAAAAAGTGGCACC |
| | | | GCCAGTGGCGGTGC |
| 52 | Loop3_L2 | M4 and Extension at the start | GTTTAAGAGCTAGAAATAGCAA |
| | | of stem loop3 with a 2 | GTTTAAATAAGGCTAGTCCGTT |
| | | basepair sequence (ca and tg) | ATCAACTTGAAAAAGTGGCACC |
| | | | GCAAGTTGCGGTGC |
| 53 | Loop3_L3 | M4 and Extension at the start | GTTTAAGAGCTAGAAATAGCAA |
| | | of stem loop3 with a 2 | GTTTAAATAAGGCTAGTCCGTT |
| | | basepair sequence (cg and tg) | ATCAACTTGAAAAAGTGGCACC |
| | | | GCGAGTTGCGGTGC |
| 54 | Loop3_L4 | M4 and Extension at the start | GTTTAAGAGCTAGAAATAGCAA |
| | | of stem loop3 with a 1 | GTTTAAATAAGGCTAGTCCGTT |
| | | basepair sequence (a and t) | ATCAACTTGAAAAAGTGGCACC |
| | | | GAAGTTCGGTGC |
| 55 | Loop3_L5 | M4 and Extension at the start | GTTTAAGAGCTAGAAATAGCAA |
| | | of stem loop3 with a 2 | GTTTAAATAAGGCTAGTCCGTT |
| | | basepair sequence (ac and gt) | ATCAACTTGAAAAAGTGGCACC |
| | | | GACAGTGTCGGTGC |
| 56 | Loop3_L6 | M4 and Extension at the start | GTTTAAGAGCTAGAAATAGCAA |
| | | of stem loop3 with a 2 | GTTTAAATAAGGCTAGTCCGTT |
| | | basepair sequence (aa and tt) | ATCAACTTGAAAAAGTGGCACC |
| | | | GAAAGTTTCGGTGC |
| 57 | Loop3_L7 | M4 and Extension at the start | GTTTAAGAGCTAGAAATAGCAA |
| | | of stem loop3 with a 2 | GTTTAAATAAGGCTAGTCCGTT |
| | | basepair sequence (ag and tt) | ATCAACTTGAAAAAGTGGCACC |
| | | | GAGAGTTTCGGTGC |
| 58 | Loop3_L8 | M4 and Extension at the start | GTTTAAGAGCTAGAAATAGCAA |
| | | of stem loop3 with a 3 | GTTTAAATAAGGCTAGTCCGTT |
| | | basepair sequence (ccc and | ATCAACTTGAAAAAGTGGCACC |
| | | ggg) | GCCCAGTGGGCGGTGC |
| 59 | Loop3_L9 | M4 and Extension at the start | GTTTAAGAGCTAGAAATAGCAA |
| | | of stem loop3 with a 4 | GTTTAAATAAGGCTAGTCCGTT |
| | | Basepair sequence (ccac and | ATCAACTTGAAAAAGTGGCACC |
| | | gtgg) | GCCACAGTGTGGCGGTGC |
| 60 | Loop3_L10 | M4 and Extension at the start | GTTTAAGAGCTAGAAATAGCAA |
| | | of stem soop3 with a 5 | GTTTAAATAAGGCTAGTCCGTT |
| | | Basepair sequence (ccaac and | ATCAACTTGAAAAAGTGGCACC |
| | | gttgg) | GCCAACAGTGTTGGCGGTGC |
| 61 | Loop3_L11 | M4 and Extension at the start | GTTTAAGAGCTAGAAATAGCAA |
| | | of stem loop3 with a 6 | GTTTAAATAAGGCTAGTCCGTT |
| | | Basepair sequence (ccacac and | ATCAACTTGAAAAAGTGGCACC |
| | | gtgtgg) | GCCACACAGTGTGTGGCGGTG |
| | | | C |
| 4280 | T_e1b_13-2 | M4; replacement of | GTTTAAGAGCGGGGAAATCCG |
| | | nucleotides 11-12 with GGG; | CAAGTTTAAATAAGGCTAGTCC |
| | | replacement of nucleotides 17- | GTTATCAACTTGAAAAAGTGGC |
| | | 18 with UCC | ACCGAGTCGGTGC |
| 4452 | T_e1b_13_SL2 | M4; replacement of | GTTTAAGAGCGGGGAAATCCG |
| | | nucleotides 11-12 with GGG; | CAAGTTTAAATAAGGCTAGTCC |
| | | replacement of nucleotides 17- | GTTATCAGCGTGAAAACGCGGC |
| | | 18 with UCC; A to G | ACCGAGTCGGTGC |
| | | substitution at nucleotide 49; | |
| | | U to G substitution at | |
| | | nucleotide 51; A to C | |
| | | substitution at nucleotide 58, | |
| | | U to C substitution at | |
| | | nucleotide 60) | |

### Nucleic Acid Moieties

[0196] In some embodiments, the PEgRNA comprises one or more nucleic acid moieties (e.g., hairpin, pseudoknot, quadruplex, tRNA sequence, aptamer) in addition to the spacer, gRNA core, primer binding site, and editing template. In some embodiments such nucleic acid moieties are positioned on the 3′ end of the PEgRNA.

[0197] In some embodiments, the nucleic acid moiety comprise a hairpin. In some embodiments, a hairpin is a nucleic acid secondary structure formed by intramolecular basepairing between a two regions of the same strand, which are typically complementary in nucleotide sequence when read in opposite directions. The two regions base-pair to form a double helix that ends in an unpaired loop. As described herein, the hairpin may be between 5 and 50 nucleotides in length, between 10 and 40 nucleotides in length, or at least 15 and 30 nucleotides in length. The hairpin may be at least 10 nucleotides in length, at least 15 nucleotides in length, at least 20 nucleotides in length, at least 25 nucleotides in length, or at least 30 nucleotides in length. In some embodiments, the hairpin is 14 nucleotides in length. In some embodiments, the hairpin is 18 nucleotides in length. In some embodiments, the hairpin is 22 nucleotides in length. In some embodiments, the hairpin comprises 2, 3, 4, 5, 6, 7, 8, 9, 10, 11, 12, 13, 14, 15 or more contiguous complementary basepairs. In some embodiments, the hairpin comprises 4, 5, 6, 7, 8, 9, or 10 contiguous complementary basepairs. In some embodiments, the hairpin comprises 4-8 contiguous complementary basepairs. In some embodiments, the hairpin comprises 5 contiguous complementary basepairs. In some embodiments, the hairpin comprises 7 contiguous complementary basepairs.

[0198] In some embodiments, the nucleic acid moiety comprises a pseudoknot. As used herein, a pseudoknot, includes, but is not limited to a nucleic acid secondary structure containing at least two stem-loop structures in which half of one stem is intercalated between the two halves of another stem. Several distinct folding topologies of pseudoknots exist, including, for example, the H type. In the H-type fold, the bases in the loop of a hairpin form intramolecular pairs with bases outside of the stem. This causes the formation of a second stem and loop, resulting in a pseudoknot with two stems and two loops. As described herein, the pseudoknot may be between 5 and 50 nucleotides in length, between 10 and 40 nucleotides in length, or at least 15 and 30 nucleotides in length. The hairpin may be at least 10 nucleotides in length, at least 15 nucleotides in length, at least 20 nucleotides in length, at least 25 nucleotides in length, or at least 30 nucleotides in length. In some embodiments, the pseudoknot is 22 nucleotides in length.

[0199] In some embodiments, the nucleic acid moiety comprises a quadruplex. In some embodiments, quadruplexes are noncanonical four-stranded, nucleic acid secondary structures that can be formed, in some contexts, in guanine-rich or cysteine-rich DNA and RNA sequences. As described herein, the quadruplexes may be between 5 and 50 nucleotides in length, between 10 and 40 nucleotides in length, or at least 15 and 30 nucleotides in length. The hairpin may be at least 10 nucleotides in length, at least 15 nucleotides in length, at least 20 nucleotides in length, at least 25 nucleotides in length, or at least 30 nucleotides in length. In some embodiments, the quadruplex is 18 nucleotides in length. In some embodiments, the quadruplex is rich in Guanine (a G-quadruplex). In some embodiments, the quadruplex is rich in Cytosine (a C-quadruplex).

[0200] In some embodiments, the nucleic acid moiety comprises an aptamer. In some embodiments, an aptamer comprises a short, single-stranded nucleic acid oligomer that can bind to a specific target molecule. Aptamers may assume a variety of shapes due to their tendency to form helices and single-stranded loops. As described herein, the aptamer may be between 5 and 50 nucleotides in length, between 10 and 40 nucleotides in length, or at least 15 and 30 nucleotides in length. The hairpin may be at least 10 nucleotides in length, at least 15 nucleotides in length, at least 20 nucleotides in length, at least 25 nucleotides in length, or at least 30 nucleotides in length. In some embodiments, the aptamer is 19 nucleotides in length. In some embodiments, the aptamer is 33 nucleotides in length.

[0201] In some embodiments, the nucleic acid moiety comprises a tRNA sequence. A tRNA sequence may be long (e.g., at least 25 nucleotides, at least 30 nucleotides, at least 35 nucleotides, at least 40 nucleotides, at least 45 nucleotides, at least 50 nucleotides, at least 55 nucleotides, at least 60 nucleotides, at least 65 nucleotides, at least 70 nucleotides, or at least 75 nucleotides) In some embodiments, a tRNA sequence may be short (less than 25 nucleotides, less than 20 nucleotides, less than 15 nucleotides, or less than 10 nucleotides). As described herein, the tRNA sequences may be between 5 and 80 nucleotides in length, between 10 and 70 nucleotides in length, or at least 15 and 60 nucleotides in length. The hairpin may be at least 10 nucleotides in length, at least 15 nucleotides in length, at least 20 nucleotides in length, at least 25 nucleotides in length, at least 30 nucleotides in length, at least 40 nucleotides in length, at least 50 nucleotides in length, at least 60 nucleotides in length, or at least 70 nucleotides in length. In some embodiments, the aptamer is 18 nucleotides in length. In some embodiments, the aptamer is 61 nucleotides in length.

[0202] Exemplary moieties can be found in Table 4. A person of skill in the art would appreciate that the present disclosure is not limited by the sequences and structures in Table 4 as the configurations in Table 4 are examples of a broader class of moieties included in the present disclosure.

[0203] In some embodiments, the one or more nucleic acid moieties comprise a hairpin (e.g., hairpin comprising a region of self-complementarity, optionally wherein the region of self-complementary comprises 2, 3, 4, 5, 6, 7, 8, 9, 10 or more contiguous complementary basepairs), a quadruplex (e.g., a G-quadruplex or a C-quadruplex, optionally wherein the G-quadruplex or the C-quadruplex is derived from a VEGF gene promoter), a tRNA sequence (e.g., a tRNA sequence, optionally wherein the tRNA sequence is a tRNA (Proline) sequence), an aptamer (e.g., an aptamer derived from a viral protein-binding sequence, optionally wherein the aptamer comprises a viral reverse transcriptase recruitment sequence, optionally wherein the aptamer comprises a MS2 protein binding sequence or a Moloney Murine leukemia (MMLV) reverse transcriptase recruitment sequence), and/or a pseudoknot (e.g. pseudoknot is derived form a potato roll leaf virus (PLRV)), or any combination thereof.

[0204] In some embodiments, the one or more nucleic acid moieties comprise a structure derived form a replication recognition sequence of a retrovirus. In some embodiments, the nucleic acid moiety comprises a sequence derived from a replication recognition sequence of a Moloney Murine leukemia virus (MMLV). In some embodiments, the one or more nucleic acid moieties comprise a nucleic acid sequence selected from SEQ ID NOs 12-15.

[0205] In some embodiments, the one or more nucleic acid moieties comprises a hairpin. In some embodiments, the hairpin comprises a sequence of any one of SEQ ID Nos: 1-3 or 5-7.

[0206] In some embodiments, the one or more nucleic acid moieties comprises a pseudoknot. In some embodiments, the pseudoknot is derived from potato roll-leaf virus. In some embodiments, the pseudoknot comprises the sequence of SEQ ID NO: 4. In some embodiments, the one or more nucleic acid moieties comprises a MS2 hairpin. In some embodiments, the nucleotide sequence of the MS2 hairpin (or also referred to as the “MS2 aptamer”) is: GCCAACATGAGGATCACCCATGTCTGCAGGGCC (SEQ ID NO: 4446). In some embodiments, the nucleotide sequence of the MS2 aptamer comprises the sequence of SEQ ID NO: 9. In some embodiments, a MS2 coat protein (MCP) recognizes the MS2 hairpin. In some embodiments, the amino acid sequence of the MCP is:

(SEQ ID NO: 4447)
GSASNFTQFVLVDNGGTGDVTVAPSNFANGVAEWISSNSRSQAYKVTCSV
RQSSAQNRKYTIKVEVPKVATQTVGGEELPVAGWRSYLNMELTIPIFATN
SDCELIVKAMQGLLKDGNPIPSAIAANSGIY.

[0207] In some embodiments, the one or more nucleic acid moieties comprises a G-quadruplex or a C-quadruplex. In some embodiments, the one or more nucleic acid moieties comprises a quadruplex from a VEGF gene promoter. In some embodiments, the quadruplex comprises the sequence of SEQ ID NO: 10 or 11.

[0208] In some embodiments, the PEgRNA comprises one or more nucleic acid moieties at its 3′ end. In some embodiments, the PEgRNA comprises one or more nucleic acid moieties at its 5′ end.

TABLE 3
Exemplary Nucleic Acid Motif Sequences

| SEQ | | | | |
|---|---|---|---|---|
| ID | | | | |
| NO. | Name | Name description | Motif Sequence | Motif length |
| 1 | hp_1 | hairpin 1 | CGGGTCTCTACGTGGGG | 22 |
| | | | GCCCG | |
| 2 | hp_1 | hairpin 1 | CGCGTCTCTACGTGGGG | 22 |
| | | | GCGCG | |
| 3 | hp_3 | hairpin 3 | GGCGCGAAAGCGCC | 14 |
| 4 | PLRV_22 | potato roll leaf | GCGGCACCGTCCGCCCA | 22 |
| | | virus pseudoknot | AACGG | |
| 5 | hp_5 | hairpin 5 | GCCCGGCGAAAGCCGGG | 18 |
| | | | C | |
| 6 | hp_4 | hairpin 4 | GCCCGGCTTCGGCCGGG | 18 |
| | | | C | |
| 7 | hp_2 | hairpin 2 | GGCGCTTCGGCGCC | 14 |
| 8 | MMLV-RT | MML Vaptamer | TTACCACGCGCTCTTAA | 33 |
| | aptamer | sequence that can | CTGCTAGCGCCATGGC | |
| | | recruit MMLV RT | | |
| 9 | MS2 | MS2 protein | ACATGAGGATCACCCAT | 19 |
| | | binding sequence. | GT | |
| 10 | G quad/ | G-quadruplex in | GGGCGGGCCGGGGGCG | 18 |
| | G4_VEGF | VEGF promoter | GG | |
| 11 | C quad/ | C-quadruplex in | CCCCGCCCCGGCCGCCC | 18 |
| | iM_VEGF | VEGF promoter | C | |
| 12 | tRNA_PBS_ | MMLV endogenous | GCTCCTCTGATTGACTA | 61 |
| | long | binding for | CCCGTCAGCGGGGGTCT | |
| | | replication | TTTGGGGGCTCGTCCGG | |
| | | | GATCGGGAGT | |
| 13 | tRNA_PBS_ | MMLV endogenous | ACTCCCGATCCCGGACG | 61 |
| | long_RC | binding for | AGCCCCCAAAAGACCCC | |
| | | replication | CGCTGACGGGTAGTCAA | |
| | | (reverse | TCAGAGGAGC | |
| | | complement) | | |
| 14 | tRNA_PBS_ | MMLV endogenous | TGGGGGCTCGTCCGGGA | 18 |
| | short | binding for | T | |
| | | replication | | |
| 15 | tRNA_PBS_ | MMLV endogenous | ATCCCGGACGAGCCCCC | 18 |
| | short_RC | binding for | A | |
| | | replication | | |
| | | (reverse | | |
| | | complement) | | |
| 4453 | evopreQ1 | Prequeosine1-1 | CGCGGTTCTATCTAGTT | 37 |
| | | riboswitch aptamer | ACGCGTTAAACCAACTA | |
| | | | GAA | |

TABLE 4
Exemplary Nucleic Acid Motif Structural Configurations

| Moiety Type | Structural Configuration |
|---|---|
| Hairpin (hp_1) (SEQ ID NO: 1) | [chemical structure] |
| Pseudoknot (PLRV_22) (SEQ ID NO: 4) | [chemical structure] |
| tRNA sequence (short) (SEQ ID NO: 14) | [chemical structure] |
| rTNA sequence (long) (SEQ ID NO: 12) | [chemical structure] |
| Aptamer (MMLV-RT) (SEQ ID NO: 8) | [chemical structure] |
| Aptamer (MS2) (SEQ ID NO: 4) | [chemical structure] |
| Quadruplex (G quad/ G4_VEGF) (SEQ ID NO: 7071) | [symbol] |
| Quadruplex (C quad/ iM_VEGF) | [symbol] |

[chemical structure]

### Tag Sequences

[0209] In some embodiments, the PEgRNA comprises a tag sequence in addition to the spacer, gRNA core, primer binding site, and editing template. In some embodiments, the tag sequence comprises a region of complementarity to the editing template. In some embodiments, the tag sequence comprises a region of complementarity to the PBS. In some embodiments, the tag sequence comprises a region of complementarity to the editing template and/or the PBS. In some embodiments, the tag sequence comprises a region of complementarity to the editing template and does not have substantial complementarity to the PBS. In some embodiments, the tag sequence comprises a region of complementarity to the editing template and does not have complementarity to the PBS. In some embodiments, the tag sequence and the editing template each comprises a region of complementarity to each other, wherein the 3′ end of the region of complementarity in the editing template is at a position 1, 2, 3, 4, 5, 6, 7, 8, 9, 10, 11, 12, 13, 14, 15, 16 or more bases 5′ of the 3′ half of the editing template. In some embodiments, the region of complementarity in the tag sequence is at a 5′ portion of the tag sequence. In some embodiments, the tag sequence does not have substantial complementarity to the spacer. In some embodiments, the tag does not have complementarity to the spacer. In some embodiments, the tag sequence is 1, 2, 3, 4, 5, 6, 7, 8, 9, 10, 11, 12, 13, 14, 15, 16 nucleotides in length. In some embodiments, the tag sequence is at least 4, at least 6, at least 8 nucleotides in length. In some embodiments, the tag sequence comprises a nucleic acid sequence selected from SEQ REF NOs 62-1960. Exemplary Tag sequences can be found in Table 5.

Lengthy table referenced here
US20250297246A1-20250925-T00001
Please refer to the end of the specification for access instructions.

### Linkers

[0210] In some embodiments, the PEgRNA comprises a linker. In some embodiments, the linker is: i) immediately 5′ of the one or more nucleic acid moieties, ii) immediately 5′ of the tag sequence, iii) immediately 3′ of the tag sequence, iv) immediately 3′ of the spacer, v) immediately 5′ of the spacer, vi) immediately 3′ of the gRNA core, or vii) immediately 5′ of the gRNA core. In some embodiments, the linker is 1, 2, 3, 4, 5, 6, 7, 8, 9, 10, 11, 12, 13, 14, 15, 16 nucleotides in length. In some embodiments, the linker is 2 to 12 nucleotides in length. In some embodiments, the linker is 5 to 20 nucleotides in length. In some embodiments, the linker is 3 to 10, 3 to 15, 3 to 20, 3 to 25, 3 to 30, 3 to 35, 3 to 40, or 3 to 50 nucleotides in length. In some embodiments, the linker is 8 nucleotides in length. In some embodiments, the linker does not form a secondary structure. In some embodiments, the linker does not have a region of complementarity to the PBS sequence. In some embodiments, the linker does not have a region of complementarity to the editing template. In some embodiments, the linker comprises a sequence selected from SEQ REF NOs 1961-3859. As used herein, a linker can be any chemical group or molecule linking two molecules/moieties, e.g., the components of the PEgRNA.

### LegRNAs

[0211] Also provided herein are legRNAs. In some embodiments, the PEgRNA is a legRNA. As used herein, a “legRNA” is a PEgRNA comprising a spacer, a gRNA core, a PBS, and an editing template (e.g., an RTT sequence), wherein the PBS and the editing template is positioned within the gRNA core. A legRNA disclosed herein may comprise any 3′ moiety or other modification disclosed herein.

[0212] In certain embodiments, the legRNAs comprise in 5′ to 3′ order: i) a spacer that comprises a region of complementarity to a search target sequence in target strand of a double stranded target DNA; ii) a 5′ part of a guide RNA (gRNA) core; iii) an editing template that comprises an intended edit compared to the double stranded target DNA; iv) a primer binding site (PBS) that comprises a region of complementarity to a region upstream of a nick site in a non-target strand of the double stranded target DNA; and v) a 3′ part of a gRNA core. In some embodiments, the 5′ part of the gRNA core comprises a direct repeat, a first stem loop, and a 5′ half of a second stem loop. In some embodiments, the 3′ part of the gRNA core comprises a 3′ half of a second stem loop and a third stem loop. In some embodiments, the 5′ part of the gRNA core and the 3′ part of the gRNA core are “split” between the 30^{th} and the 31^{st}, the 31^{st} and the 32^{nd}, the 32^{nd} and the 33^{rd}, the 33^{rd} and the 34^{th}, the 34^{th} and the 35^{th}, the 35^{th} and the 36^{th}, the 36^{th} and the 37^{th}, the 37^{th} and the 38^{th}, the 38^{th} and the 39^{th}, or the 39^{th} and 40^{th} nucleotides of the full gRNA core sequence, wherein the position numbering of the nucleotides is as set forth in SEQ ID NO: 16. In some embodiments, the 5′ part of the gRNA core and the 3′ part of the gRNA core are “split” at between the 50^{th} and the 51^{st}, the 51^{st} and the 52^{nd}, the 52^{nd} and the 55^{rd}, the 55^{rd} and the 54^{th}, the 54^{th} and the 55^{th}, the 55^{th} and the 56^{th}, the 56^{th} and the 57^{th}, the 57^{th} and the 58^{th}, the 58^{th} and the 59^{th}, or the 59^{th} and 60^{th} nucleotides of the full gRNA core sequence, wherein the position numbering of the nucleotides is as set forth in SEQ ID NO: 16. In some embodiments, the 5′ part of the gRNA core and the 3′ part of the gRNA core are split between the 54^{th} and the 55^{th} nucleotides of the full gRNA core sequence, wherein the position numbering of the nucleotides is as set forth in SEQ ID NO: 16. In some embodiments, the 5′ part of the gRNA core comprises the sequence GTTTAAGAGCTAGAAATAGCAAGTTTAAATAAGGCTAGTCCGTTATCAGCGTGA (SEQ ID NO: 6376). In some embodiments, the 3′ part of the gRNA core comprises the sequence AAACGCGGCACCGAGTCGGTGC (SEQ ID NO: 6377).

[0213] Exemplary legRNA are found in Table 6 below.

[0214] In some embodiments, the PEgRNA further comprises a tag sequence that comprises a region of complementarity to the PBS and/or the editing template.

[0215] The legRNA may comprise a tag sequence, an aptamer, a hairpin, a quadruplex, a tRNA, a pseudoknot, a linker, or any nucleic acid moieties as described herein. In some embodiments, the legRNA comprises a linker. In some embodiments, the linker is: i) immediately 5′ of the one or more nucleic acid moieties, ii) immediately 5′ of the tag sequence, iii) immediately 3′ of the tag sequence, iv) immediately 3′ of the spacer, v) immediately 5′ of the spacer, vi) immediately 3′ of the gRNA core, and/or vii) immediately 5′ of the gRNA core. In some embodiments, the linker is 1, 2, 3, 4, 5, 6, 7, 8, 9, 10, 11, 12, 13, 14, 15, 16 nucleotides in length. In some embodiments, the linker does not form a secondary structure. In some embodiments, the linker does not have a region of complementarity to the PBS sequence. In some embodiments, the linker does not have a region of complementarity to the editing template. In some embodiments, the linker comprises a nucleic acid sequence selected from SEQ REF NOs 1961-3859. As used herein, a linker can be any chemical group or a molecule linking two molecules or moieties, e.g., the components of the legRNA.

TABLE 6
Exemplary LegRNA sequences

| SEQ ID | | | |
|---|---|---|---|
| NO. | Edit | Variant | PEgRNA |
| 4360 | ATP7B_H1069Q_ | LegRNA_ATP7B_H1069Q_ | GTTTGGTGACTGCCACGCCCAGTTTAAGAGCTAGAAATAGCAAGT |
| | noPAM_82 | noPAM_82_Linker0 | TTAAATAAGGCTAGTCCGTTATCAGCGTGAAACACCCCTTGGGCG |
| | | | TGGCAAACGCGGCACCGAGTCGGTGC |
| 4361 | ATP7B_H1069Q_ | LegRNA_ATP7B_H1069Q_ | GTTTGGTGACTGCCACGCCCAGTTTAAGAGCTAGAAATAGCAAGT |
| | noPAM_82 | noPAM_82_Linker2 | TTAAATAAGGCTAGTCCGTTATCAGCGTGAAACACCCCTTGGGCG |
| | | | TGGCCAAAACGCGGCACCGAGTCGGTGC |
| 4362 | ATP7B_H1069Q_ | LegRNA_ATP7B_H1069Q_ | GTTTGGTGACTGCCACGCCCAGTTTAAGAGCTAGAAATAGCAAGT |
| | noPAM_82 | noPAM_82_Linker4 | TTAAATAAGGCTAGTCCGTTATCAGCGTGAAACACCCCTTGGGCG |
| | | | TGGCCCTAAAACGCGGCACCGAGTCGGTGC |
| 4363 | ATP7B_H1069Q_ | LegRNA_ATP7B_H1069Q_ | GTTTGGTGACTGCCACGCCCAGTTTAAGAGCTAGAAATAGCAAGT |
| | noPAM_82 | noPAM_82_Linker6 | TTAAATAAGGCTAGTCCGTTATCAGCGTGAAACACCCCTTGGGCG |
| | | | TGGCGGCCTAAAACGCGGCACCGAGTCGGTGC |
| 4364 | ATP7B_H1069Q_ | LegRNA_ATP7B_H1069Q_ | GTTTGGTGACTGCCACGCCCAGTTTAAGAGCTAGAAATAGCAAGT |
| | noPAM_82 | noPAM_82_Linker8 | TTAAATAAGGCTAGTCCGTTATCAGCGTGAAACACCCCTTGGGCG |
| | | | TGGCGGCCTGGGAAACGCGGCACCGAGTCGGTGC |
| 4365 | ATP7B_H1069Q_ | LegRNA_ATP7B_H1069Q_ | GTTTGGTGACTGCCACGCCCAGTTTAAGAGCTAGAAATAGCAAGT |
| | noPAM_88 | noPAM_88_Linker0 | TTAAATAAGGCTAGTCCGTTATCAGCGTGAAACACCCCTTGGGCG |
| | | | TGGCAGTCACAAACGCGGCACCGAGTCGGTGC |
| 4366 | ATP7B_H1069Q_ | LegRNA_ATP7B_H1069Q_ | GTTTGGTGACTGCCACGCCCAGTTTAAGAGCTAGAAATAGCAAGT |
| | noPAM_88 | noPAM_88_Linker2 | TTAAATAAGGCTAGTCCGTTATCAGCGTGAAACACCCCTTGGGCG |
| | | | TGGCAGTCACAGAAACGCGGCACCGAGTCGGTGC |
| 4367 | ATP7B_H1069Q_ | LegRNA_ATP7B_H1069Q_ | GTTTGGTGACTGCCACGCCCAGTTTAAGAGCTAGAAATAGCAAGT |
| | noPAM_88 | noPAM_88_Linker4 | TTAAATAAGGCTAGTCCGTTATCAGCGTGAAACACCCCTTGGGCG |
| | | | TGGCAGTCACAGGAAAACGCGGCACCGAGTCGGTGC |
| 4368 | ATP7B_H1069Q_ | LegRNA_ATP7B_H1069Q_ | GTTTGGTGACTGCCACGCCCAGTTTAAGAGCTAGAAATAGCAAGT |
| | noPAM_88 | noPAM_88_Linker6 | TTAAATAAGGCTAGTCCGTTATCAGCGTGAAACACCCCTTGGGCG |
| | | | TGGCAGTCACACAGAAAAACGCGGCACCGAGTCGGTGC |
| 4369 | ATP7B_H1069Q_ | LegRNA_ATP7B_H1069Q_ | GTTTGGTGACTGCCACGCCCAGTTTAAGAGCTAGAAATAGCAAGT |
| | noPAM_88 | noPAM_88_Linker8 | TTAAATAAGGCTAGTCCGTTATCAGCGTGAAACACCCCTTGGGCG |
| | | | TGGCAGTCACCAGGTTCAAAACGCGGCACCGAGTCGGTGC |
| 4370 | ATP7B_R778L_ | LegRNA_ATP7B_R778L_ | GTTGCCAAGTGTTCCAGCCACGTTTAAGAGCTAGAAATAGCAAGT |
| | noPAM_132 | noPAM_132_Linker0 | TTAAATAAGGCTAGTCCGTTATCAGCGTGATTGCCCTGGGCCGGT |
| | | | GGCTGGAACACTAAACGCGGCACCGAGTCGGTGC |
| 4371 | ATP7B_R778L_ | LegRNA_ATP7B_R778L_ | GTTGCCAAGTGTTCCAGCCACGTTTAAGAGCTAGAAATAGCAAGT |
| | noPAM_132 | noPAM_132_Linker2 | TTAAATAAGGCTAGTCCGTTATCAGCGTGATTGCCCTGGGCCGGT |
| | | | GGCTGGAACACTCCAAACGCGGCACCGAGTCGGTGC |
| 4372 | ATP7B_R778L_ | LegRNA_ATP7B_R778L_ | GTTGCCAAGTGTTCCAGCCACGTTTAAGAGCTAGAAATAGCAAGT |
| | noPAM_132 | noPAM_132_Linker4 | TTAAATAAGGCTAGTCCGTTATCAGCGTGATTGCCCTGGGCCGGT |
| | | | GGCTGGAACACTCACCAAACGCGGCACCGAGTCGGTGC |
| 4373 | ATP7B_R778L_ | LegRNA_ATP7B_R778L_ | GTTGCCAAGTGTTCCAGCCACGTTTAAGAGCTAGAAATAGCAAGT |
| | noPAM_132 | noPAM_132_Linker6 | TTAAATAAGGCTAGTCCGTTATCAGCGTGATTGCCCTGGGCCGGT |
| | | | GGCTGGAACACTCCTCATAAACGCGGCACCGAGTCGGTGC |
| 4374 | ATP7B_R778L_ | LegRNA_ATP7B_R778L_ | GTTGCCAAGTGTTCCAGCCACGTTTAAGAGCTAGAAATAGCAAGT |
| | noPAM_132 | noPAM_132_Linker8 | TTAAATAAGGCTAGTCCGTTATCAGCGTGATTGCCCTGGGCCGGT |
| | | | GGCTGGAACACTCCTCACTCAAACGCGGCACCGAGTCGGTGC |
| 4375 | ATP7B_R778L_ | LegRNA_ATP7B_R778L_ | GTTGCCAAGTGTTCCAGCCACGTTTAAGAGCTAGAAATAGCAAGT |
| | noPAM_117 | noPAM_117_Linker0 | TTAAATAAGGCTAGTCCGTTATCAGCGTGAGCCCTGGGCCGGTGG |
| | | | CTGGAACACTTAAACGCGGCACCGAGTCGGTGC |
| 4376 | ATP7B_R778L_ | LegRNA_ATP7B_R778L_ | GTTGCCAAGTGTTCCAGCCACGTTTAAGAGCTAGAAATAGCAAGT |
| | noPAM_117 | noPAM_117_Linker2 | TTAAATAAGGCTAGTCCGTTATCAGCGTGAGCCCTGGGCCGGTGG |
| | | | CTGGAACACTTAAAAACGCGGCACCGAGTCGGTGC |
| 4377 | ATP7B_R778L_ | LegRNA_ATP7B_R778L_ | GTTGCCAAGTGTTCCAGCCACGTTTAAGAGCTAGAAATAGCAAGT |
| | noPAM_117 | noPAM_117_Linker4 | TTAAATAAGGCTAGTCCGTTATCAGCGTGAGCCCTGGGCCGGTGG |
| | | | CTGGAACACTTTCCTAAACGCGGCACCGAGTCGGTGC |
| 4378 | ATP7B_R778L_ | LegRNA_ATP7B_R778L_ | GTTGCCAAGTGTTCCAGCCACGTTTAAGAGCTAGAAATAGCAAGT |
| | noPAM_117 | noPAM_117_Linker6 | TTAAATAAGGCTAGTCCGTTATCAGCGTGAGCCCTGGGCCGGTGG |
| | | | CTGGAACACTTTCAGAGAAACGCGGCACCGAGTCGGTGC |
| 4379 | ATP7B_R778L_ | LegRNA_ATP7B_R778L_ | GTTGCCAAGTGTTCCAGCCACGTTTAAGAGCTAGAAATAGCAAGT |
| | noPAM_117 | noPAM_117_Linker8 | TTAAATAAGGCTAGTCCGTTATCAGCGTGAGCCCTGGGCCGGTGG |
| | | | CTGGAACACTTTAAAATTTAAACGCGGCACCGAGTCGGTGC |
| 4380 | NCF1_delGT_16 | LegRNA_NCF1_delGT_ | GTCACCAGGAACATGTACCTGGTTTAAGAGCTAGAAATAGCAAG |
| | | 16_Linker0 | TTTAAATAAGGCTAGTCCGTTATCAGCGTGATTCCCCCAGGTGTA |
| | | | CATGTTCCTGAAACGCGGCACCGAGTCGGTGC |
| 4381 | NCF1_delGT_16 | LegRNA_NCF1_delGT_ | GTCACCAGGAACATGTACCTGGTTTAAGAGCTAGAAATAGCAAG |
| | | 16_Linker2 | TTTAAATAAGGCTAGTCCGTTATCAGCGTGATTCCCCCAGGTGTA |
| | | | CATGTTCCTGCTAAACGCGGCACCGAGTCGGTGC |
| 4382 | NCF1_delGT_16 | LegRNA_NCF1_delGT_ | GTCACCAGGAACATGTACCTGGTTTAAGAGCTAGAAATAGCAAG |
| | | 16_Linker4 | TTTAAATAAGGCTAGTCCGTTATCAGCGTGATTCCCCCAGGTGTA |
| | | | CATGTTCCTGCAAGAAACGCGGCACCGAGTCGGTGC |
| 4383 | NCF1_delGT_16 | LegRNA_NCF1_delGT_ | GTCACCAGGAACATGTACCTGGTTTAAGAGCTAGAAATAGCAAG |
| | | 16_Linker6 | TTTAAATAAGGCTAGTCCGTTATCAGCGTGATTCCCCCAGGTGTA |
| | | | CATGTTCCTGTGCTCTAAACGCGGCACCGAGTCGGTGC |
| 4384 | NCF1_delGT_16 | LegRNA_NCF1_delGT_ | GTCACCAGGAACATGTACCTGGTTTAAGAGCTAGAAATAGCAAG |
| | | 16_Linker8 | TTTAAATAAGGCTAGTCCGTTATCAGCGTGATTCCCCCAGGTGTA |
| | | | CATGTTCCTGCTTCTTCGAAACGCGGCACCGAGTCGGTGC |
| 4385 | NCF1_delGT_10 | LegRNA_NCF1_delGT_ | GTCACCAGGAACATGTACCTGGTTTAAGAGCTAGAAATAGCAAG |
| | | 10_Linker0 | TTTAAATAAGGCTAGTCCGTTATCAGCGTGATTCCCCCAGGTGTA |
| | | | CATGAAACGCGGCACCGAGTCGGTGC |
| 4386 | NCF1_delGT_10 | LegRNA_NCF1_delGT_ | GTCACCAGGAACATGTACCTGGTTTAAGAGCTAGAAATAGCAAG |
| | | 10_Linker2 | TTTAAATAAGGCTAGTCCGTTATCAGCGTGATTCCCCCAGGTGTA |
| | | | CATGATAAACGCGGCACCGAGTCGGTGC |
| 4387 | NCF1_delGT_10 | LegRNA_NCF1_delGT_ | GTCACCAGGAACATGTACCTGGTTTAAGAGCTAGAAATAGCAAG |
| | | 10_Linker4 | TTTAAATAAGGCTAGTCCGTTATCAGCGTGATTCCCCCAGGTGTA |
| | | | CATGAATAAAACGCGGCACCGAGTCGGTGC |
| 4388 | NCF1_delGT_10 | LegRNA_NCF1_delGT_ | GTCACCAGGAACATGTACCTGGTTTAAGAGCTAGAAATAGCAAG |
| | | 10_Linker6 | TTTAAATAAGGCTAGTCCGTTATCAGCGTGATTCCCCCAGGTGTA |
| | | | CATGACTACTAAACGCGGCACCGAGTCGGTGC |
| 4389 | NCF1_delGT_10 | LegRNA_NCF1_delGT_ | GTCACCAGGAACATGTACCTGGTTTAAGAGCTAGAAATAGCAAG |
| | | 10_Linker8 | TTTAAATAAGGCTAGTCCGTTATCAGCGTGATTCCCCCAGGTGTA |
| | | | CATGACTAAAACAAACGCGGCACCGAGTCGGTGC |
| 4390 | HEK3_6G_C_18 | LegRNA_HEK3_6G_C_ | GGCCCAGACTGAGCACGTGAGTTTAAGAGCTAGAAATAGCAAGT |
| | | 18_Linker0 | TTAAATAAGGCTAGTCCGTTATCAGCGTGATTCCTCTGGCATCAC |
| | | | GTGCTCAGAAACGCGGCACCGAGTCGGTGC |
| 4391 | HEK3_6G_C_18 | LegRNA_HEK3_6G_C_ | GGCCCAGACTGAGCACGTGAGTTTAAGAGCTAGAAATAGCAAGT |
| | | 18_Linker2 | TTAAATAAGGCTAGTCCGTTATCAGCGTGATTCCTCTGGCATCAC |
| | | | GTGCTCAGAGAAACGCGGCACCGAGTCGGTGC |
| 4392 | HEK3_6G_C_18 | LegRNA_HEK3_6G_C_ | GGCCCAGACTGAGCACGTGAGTTTAAGAGCTAGAAATAGCAAGT |
| | | 18_Linker4 | TTAAATAAGGCTAGTCCGTTATCAGCGTGATTCCTCTGGCATCAC |
| | | | GTGCTCAGAAAGAAACGCGGCACCGAGTCGGTGC |
| 4393 | HEK3_6G_C_18 | LegRNA_HEK3_6G_C_ | GGCCCAGACTGAGCACGTGAGTTTAAGAGCTAGAAATAGCAAGT |
| | | 81_Linker6 | TTAAATAAGGCTAGTCCGTTATCAGCGTGATTCCTCTGGCATCAC |
| | | | GTGCTCAGATTCCAAAACGCGGCACCGAGTCGGTGC |
| 4394 | HEK3_6G_C_18 | LegRNA_HEK3_6G_C_ | GGCCCAGACTGAGCACGTGAGTTTAAGAGCTAGAAATAGCAAGT |
| | | 18_Linker8 | TTAAATAAGGCTAGTCCGTTATCAGCGTGATTCCTCTGGCATCAC |
| | | | GTGCTCAGGCACAAAGAAACGCGGCACCGAGTCGGTGC |
| 4395 | HEK3_CTTins_ | LegRNA_HEK3_CTTins | GGCCCAGACTGAGCACGTGAGTTTAAGAGCTAGAAATAGCAAGT |
| | 36 | 36_Linker0 | TTAAATAAGGCTAGTCCGTTATCAGCGTGATTCCTCTGCCATCAA |
| | | | AGCGTGCTCAGTCAAACGCGGCACCGAGTCGGTGC |
| 4396 | HEK3_CTTins_ | LegRNA_HEK3_CTTins_ | GGCCCAGACTGAGCACGTGAGTTTAAGAGCTAGAAATAGCAAGT |
| | 36 | 36_Linker2 | TTAAATAAGGCTAGTCCGTTATCAGCGTGATTCCTCTGCCATCAA |
| | | | AGCGTGCTCAGTCCAAAACGCGGCACCGAGTCGGTGC |
| 4397 | HEK3_CTTins_ | LegRNA_HEK3_CTTins_ | GGCCCAGACTGAGCACGTGAGTTTAAGAGCTAGAAATAGCAAGT |
| | 36 | 36_Linker4 | TTAAATAAGGCTAGTCCGTTATCAGCGTGATTCCTCTGCCATCAA |
| | | | AGCGTGCTCAGTCCACAAAACGCGGCACCGAGTCGGTGC |
| 4398 | HEK3_CTTins_ | LegRNA_HEK3_CTTins_ | GGCCCAGACTGAGCACGTGAGTTTAAGAGCTAGAAATAGCAAGT |
| | 36 | 36_Linker6 | TTAAATAAGGCTAGTCCGTTATCAGCGTGATTCCTCTGCCATCAA |
| | | | AGCGTGCTCAGTCCCATTCAAACGCGGCACCGAGTCGGTGC |
| 4399 | HEK3_CTTins_ | LegRNA_HEK3_CTTins_ | GGCCCAGACTGAGCACGTGAGTTTAAGAGCTAGAAATAGCAAGT |
| | 36 | 36_Linker8 | TTAAATAAGGCTAGTCCGTTATCAGCGTGATTCCTCTGCCATCAA |
| | | | AGCGTGCTCAGTCCAACTGATAAACGCGGCACCGAGTCGGTGC |
| 4400 | EMX1_1G_C_ | LegRNA_EMX1_1G_C_ | GAGTCCGAGCAGAAGAAGAAGTTTAAGAGCTAGAAATAGCAAGT |
| | 30 | 30_Linker0 | TTAAATAAGGCTAGTCCGTTATCAGCGTGAGATGGGAGCCCTTGT |
| | | | TCTTCTGCTCGGAAACGCGGCACCGAGTCGGTGC |
| 4401 | EMX1_1G_C_ | LegRNA_EMX1_1G_C_ | GAGTCCGAGCAGAAGAAGAAGTTTAAGAGCTAGAAATAGCAAGT |
| | 30 | 30_Linker2 | TTAAATAAGGCTAGTCCGTTATCAGCGTGAGATGGGAGCCCTTGT |
| | | | TCTTCTGCTCGGTGAAACGCGGCACCGAGTCGGTGC |
| 4402 | EMX1_1G_C_ | LegRNA_EMX1_1G_C_ | GAGTCCGAGCAGAAGAAGAAGTTTAAGAGCTAGAAATAGCAAGT |
| | 30 | 30_Linker4 | TTAAATAAGGCTAGTCCGTTATCAGCGTGAGATGGGAGCCCTTGT |
| | | | TCTTCTGCTCGGGTTGAAACGCGGCACCGAGTCGGTGC |
| 4403 | EMX1_1G_C_ | LegRNA_EMX1_1G_C_ | GAGTCCGAGCAGAAGAAGAAGTTTAAGAGCTAGAAATAGCAAGT |
| | 03 | 30_Linker6 | TTAAATAAGGCTAGTCCGTTATCAGCGTGAGATGGGAGCCCTTGT |
| | | | TCTTCTGCTCGGTGAAAAAAACGCGGCACCGAGTCGGTGC |
| 4404 | EMX1_1G_C_ | LegRNA_EMX1_1G_C_ | GAGTCCGAGCAGAAGAAGAAGTTTAAGAGCTAGAAATAGCAAGT |
| | 30 | 30_Linker8 | TTAAATAAGGCTAGTCCGTTATCAGCGTGAGATGGGAGCCCTTGT |
| | | | TCTTCTGCTCGGTAAACAGTAAACGCGGCACCGAGTCGGTGC |
| 4405 | EMX1_TGCins_ | LegRNA_EMX1_TGCins_ | GAGTCCGAGCAGAAGAAGAAGTTTAAGAGCTAGAAATAGCAAGT |
| | 12 | 12_Linker0 | TTAAATAAGGCTAGTCCGTTATCAGCGTGAGAGCCCTTCGCATTC |
| | | | TTCTGCTCAAACGCGGCACCGAGTCGGTGC |
| 4406 | EMX1_TGCins_ | LegRNA_EMX1_TGCins_ | GAGTCCGAGCAGAAGAAGAAGTTTAAGAGCTAGAAATAGCAAGT |
| | 12 | 12_Linker2 | TTAAATAAGGCTAGTCCGTTATCAGCGTGAGAGCCCTTCGCATTC |
| | | | TTCTGCTCCCAAACGCGGCACCGAGTCGGTGC |
| 4407 | EMX1_TGCins_ | LegRNA_EMX1_TGCins_ | GAGTCCGAGCAGAAGAAGAAGTTTAAGAGCTAGAAATAGCAAGT |
| | 12 | 12_Linker4 | TTAAATAAGGCTAGTCCGTTATCAGCGTGAGAGCCCTTCGCATTC |
| | | | TTCTGCTCCCCCAAACGCGGCACCGAGTCGGTGC |
| 4408 | EMX1_TGCins_ | LegRNA_EMX1_TGCins_ | GAGTCCGAGCAGAAGAAGAAGTTTAAGAGCTAGAAATAGCAAGT |
| | 12 | 12_Linker6 | TTAAATAAGGCTAGTCCGTTATCAGCGTGAGAGCCCTTCGCATTC |
| | | | TTCTGCTCCTAAAGAAACGCGGCACCGAGTCGGTGC |
| 4409 | EMX1_TGCins_ | LegRNA_EMX1_TGCins_ | GAGTCCGAGCAGAAGAAGAAGTTTAAGAGCTAGAAATAGCAAGT |
| | 12 | 12_Linker8 | TTAAATAAGGCTAGTCCGTTATCAGCGTGAGAGCCCTTCGCATTC |
| | | | TTCTGCTCCAGTCCCCAAACGCGGCACCGAGTCGGTGC |
| 4410 | FANCF_delACC_ | LegRNA_FANCF_delACC_ | GGAATCCCTTCTGCAGCACCGTTTAAGAGCTAGAAATAGCAAGTT |
| | 4 | 4_Linker0 | TAAATAAGGCTAGTCCGTTATCAGCGTGAAAGCGATCCAGCTGCA |
| | | | GAAGGAAACGCGGCACCGAGTCGGTGC |
| 4411 | FANCF_delACC_ | LegRNA_FANCF_delACC_ | GGAATCCCTTCTGCAGCACCGTTTAAGAGCTAGAAATAGCAAGTT |
| | 4 | 4_Linker2 | TAAATAAGGCTAGTCCGTTATCAGCGTGAAAGCGATCCAGCTGCA |
| | | | GAAGGCTAAACGCGGCACCGAGTCGGTGC |
| 4412 | FANCF_delACC_ | LegRNA_FANCF_delACC_ | GGAATCCCTTCTGCAGCACCGTTTAAGAGCTAGAAATAGCAAGTT |
| | 4 | 4_Linker4 | TAAATAAGGCTAGTCCGTTATCAGCGTGAAAGCGATCCAGCTGCA |
| | | | GAAGGCTAAAAACGCGGCACCGAGTCGGTGC |
| 4413 | FANCF_delACC_ | LegRNA_FANCF_delACC_ | GGAATCCCTTCTGCAGCACCGTTTAAGAGCTAGAAATAGCAAGTT |
| | 4 | 4_Linker6 | TAAATAAGGCTAGTCCGTTATCAGCGTGAAAGCGATCCAGCTGCA |
| | | | GAAGGCCCTACAAACGCGGCACCGAGTCGGTGC |
| 4414 | FANCF_delACC_ | LegRNA_FANCF_delACC_ | GGAATCCCTTCTGCAGCACCGTTTAAGAGCTAGAAATAGCAAGTT |
| | 4 | 4_Linker8 | TAAATAAGGCTAGTCCGTTATCAGCGTGAAAGCGATCCAGCTGCA |
| | | | GAAGGCTAATAGTAAACGCGGCACCGAGTCGGTGC |
| 4415 | FANCF_5G_T_ | LegRNA_FANCF_5G_T_ | GGAATCCCTTCTGCAGCACCGTTTAAGAGCTAGAAATAGCAAGTT |
| | 9 | 9_Linker0 | TAAATAAGGCTAGTCCGTTATCAGCGTGAAAGCGATCAAGGTGCT |
| | | | GCAGAAAACGCGGCACCGAGTCGGTGC |
| 4416 | FANCF_5G_T_ | LegRNA_FANCF_5G_T_ | GGAATCCCTTCTGCAGCACCGTTTAAGAGCTAGAAATAGCAAGTT |
| | 9 | 9_Linker2 | TAAATAAGGCTAGTCCGTTATCAGCGTGAAAGCGATCAAGGTGCT |
| | | | GCAGACAAAACGCGGCACCGAGTCGGTGC |
| 4417 | FANCF_5G_T_ | LegRNA_FANCF_5G_T | GGAATCCCTTCTGCAGCACCGTTTAAGAGCTAGAAATAGCAAGTT |
| | 9 | 9_Linker4 | TAAATAAGGCTAGTCCGTTATCAGCGTGAAAGCGATCAAGGTGCT |
| | | | GCAGACATCAAACGCGGCACCGAGTCGGTGC |
| 4418 | FANCF_5G_T_ | LegRNA_FANCF_5G_T_ | GGAATCCCTTCTGCAGCACCGTTTAAGAGCTAGAAATAGCAAGTT |
| | 9 | 9_Linker6 | TAAATAAGGCTAGTCCGTTATCAGCGTGAAAGCGATCAAGGTGCT |
| | | | GCAGACCTGTCAAACGCGGCACCGAGTCGGTGC |
| 4419 | FANCF_5G_T_ | LegRNA_FANCF_5G_T_ | GGAATCCCTTCTGCAGCACCGTTTAAGAGCTAGAAATAGCAAGTT |
| | 9 | 9_Linker8 | TAAATAAGGCTAGTCCGTTATCAGCGTGAAAGCGATCAAGGTGCT |
| | | | GCAGACAGACTTCAAACGCGGCACCGAGTCGGTGC |
| 4420 | RHO_P23H_ | LegRNA_RHO_P23H_ | GGCTCAGCCAGGTAGTACTGGTTTAAGAGCTAGAAATAGCAAGT |
| | noPAM_229 | PAM_229_Linker0 | TTAAATAAGGCTAGTCCGTTATCAGCGTGAACGCAGCCCCTTCGA |
| | | no | GTACCCACAGTACTACCTGGAAACGCGGCACCGAGTCGGTGC |
| 4421 | RHO_P23H_ | LegRNA_RHO_P23H_ | GGCTCAGCCAGGTAGTACTGGTTTAAGAGCTAGAAATAGCAAGT |
| | noPAM_229 | noPAM_229_Linker2 | TTAAATAAGGCTAGTCCGTTATCAGCGTGAACGCAGCCCCTTCGA |
| | | | GTACCCACAGTACTACCTGGACAAACGCGGCACCGAGTCGGTGC |
| 4422 | RHO_P23H_ | LegRNA_RHO_P23H_ | GGCTCAGCCAGGTAGTACTGGTTTAAGAGCTAGAAATAGCAAGT |
| | noPAM_229 | noPAM_229_Linker4 | TTAAATAAGGCTAGTCCGTTATCAGCGTGAACGCAGCCCCTTCGA |
| | | | GTACCCACAGTACTACCTGGAAAAAAACGCGGCACCGAGTCGGT |
| | | | GC |
| 4423 | RHO_P23H_ | LegRNA_RHO_P23H_ | GGCTCAGCCAGGTAGTACTGGTTTAAGAGCTAGAAATAGCAAGT |
| | noPAM_229 | noPAM_229_Linker6 | TTAAATAAGGCTAGTCCGTTATCAGCGTGAACGCAGCCCCTTCGA |
| | | | GTACCCACAGTACTACCTGGGACCAAAAACGCGGCACCGAGTCG |
| | | | GTGC |
| 4424 | RHO_P23H_ | LegRNA_RHO_P23H_ | GGCTCAGCCAGGTAGTACTGGTTTAAGAGCTAGAAATAGCAAGT |
| | noPAM_229 | noPAM_229_Linker8 | TTAAATAAGGCTAGTCCGTTATCAGCGTGAACGCAGCCCCTTCGA |
| | | | GTACCCACAGTACTACCTGGATAATATGAAACGCGGCACCGAGT |
| | | | CGGTGC |
| 4425 | RHO_P23H_ | LegRNA_RHO_P23H_ | GAGTACTGTGGGTACTCGAAGGTTTAAGAGCTAGAAATAGCAAG |
| | noPAM_160 | noPAM_160_Linker0 | TTTAAATAAGGCTAGTCCGTTATCAGCGTGAGTGTGGTACGCAGC |
| | | | CCCTTCGAGTACCCACAGAAACGCGGCACCGAGTCGGTGC |
| 4426 | RHO_P23H_ | LegRNA_RHO_P23H_ | GAGTACTGTGGGTACTCGAAGGTTTAAGAGCTAGAAATAGCAAG |
| | noPAM_160 | noPAM_160_Linker2 | TTTAAATAAGGCTAGTCCGTTATCAGCGTGAGTGTGGTACGCAGC |
| | | | CCCTTCGAGTACCCACAGAGAAACGCGGCACCGAGTCGGTGC |
| 4427 | RHO_P23H_ | LegRNA_RHO_P23H_ | GAGTACTGTGGGTACTCGAAGGTTTAAGAGCTAGAAATAGCAAG |
| | noPAM_160 | noPAM_160_Linker4 | TTTAAATAAGGCTAGTCCGTTATCAGCGTGAGTGTGGTACGCAGC |
| | | | CCCTTCGAGTACCCACAGCCGAAAACGCGGCACCGAGTCGGTGC |
| 4428 | RHO_P23H_ | LegRNA_RHO_P23H_ | GAGTACTGTGGGTACTCGAAGGTTTAAGAGCTAGAAATAGCAAG |
| | noPAM_160 | noPAM_160_Linker6 | TTTAAATAAGGCTAGTCCGTTATCAGCGTGAGTGTGGTACGCAGC |
| | | | CCCTTCGAGTACCCACAGATCATAAAACGCGGCACCGAGTCGGT |
| | | | GC |
| 4429 | RHO_P23H_ | LegRNA_RHO_P23H_ | GAGTACTGTGGGTACTCGAAGGTTTAAGAGCTAGAAATAGCAAG |
| | noPAM_160 | noPAM_160_Linker8 | TTTAAATAAGGCTAGTCCGTTATCAGCGTGAGTGTGGTACGCAGC |
| | | | CCCTTCGAGTACCCACAGATAGCCCAAAACGCGGCACCGAGTCG |
| | | | GTGC |
| 4430 | SLC37A4_ | LegRNA_SLC37A4_ | GCAGCTCTGGATCCTGGTATGTTTAAGAGCTAGAAATAGCAAGTT |
| | G339C_93 | G339C_93_Linker0 | TAAATAAGGCTAGTCCGTTATCAGCGTGAAGAAACCAAATACAG |
| | | | CTCCCAATACCAGGATCCAAACGCGGCACCGAGTCGGTGC |
| 4431 | SLC37A4_ | LegRNA_SLC37A4_ | GCAGCTCTGGATCCTGGTATGTTTAAGAGCTAGAAATAGCAAGTT |
| | G339C_93 | G339C_93_Linker2 | TAAATAAGGCTAGTCCGTTATCAGCGTGAAGAAACCAAATACAG |
| | | | CTCCCAATACCAGGATCCCCAAACGCGGCACCGAGTCGGTGC |
| 4432 | SLC37A4_ | LegRNA_SLC37A4_ | GCAGCTCTGGATCCTGGTATGTTTAAGAGCTAGAAATAGCAAGTT |
| | G339C_93 | G339C_93_Linker4 | TAAATAAGGCTAGTCCGTTATCAGCGTGAAGAAACCAAATACAG |
| | | | CTCCCAATACCAGGATCCCACAAAACGCGGCACCGAGTCGGTGC |
| 4433 | SLC37A4_ | LegRNA_SLC37A4_ | GCAGCTCTGGATCCTGGTATGTTTAAGAGCTAGAAATAGCAAGTT |
| | G339C_93 | G339C_93_Linker6 | TAAATAAGGCTAGTCCGTTATCAGCGTGAAGAAACCAAATACAG |
| | | | CTCCCAATACCAGGATCCCTATATAAACGCGGCACCGAGTCGGTG |
| | | | C |
| 4434 | SLC37A4_ | LegRNA_SLC37A4_ | GCAGCTCTGGATCCTGGTATGTTTAAGAGCTAGAAATAGCAAGTT |
| | G339C_93 | G339C_93_Linker8 | TAAATAAGGCTAGTCCGTTATCAGCGTGAAGAAACCAAATACAG |
| | | | CTCCCAATACCAGGATCCCCCGATCAAAACGCGGCACCGAGTCG |
| | | | GTGC |
| 4435 | SLC37A4_ | LegRNA_SLC37A4_ | GCAGCTCTGGATCCTGGTATGTTTAAGAGCTAGAAATAGCAAGTT |
| | G339C_85 | G339C_85_Linker0 | TAAATAAGGCTAGTCCGTTATCAGCGTGAGAAACCAAATACAGC |
| | | | TCCCAATACCAGGATCCAAAACGCGGCACCGAGTCGGTGC |
| 4436 | SLC37A4_ | LegRNA_SLC37A4_ | GCAGCTCTGGATCCTGGTATGTTTAAGAGCTAGAAATAGCAAGTT |
| | G339C_85 | G339C_85_Linker2 | TAAATAAGGCTAGTCCGTTATCAGCGTGAGAAACCAAATACAGC |
| | | | TCCCAATACCAGGATCCACCAAACGCGGCACCGAGTCGGTGC |
| 4437 | SLC37A4_ | LegRNA_SLC37A4_ | GCAGCTCTGGATCCTGGTATGTTTAAGAGCTAGAAATAGCAAGTT |
| | G339C_85 | G339C_85_Linker4 | TAAATAAGGCTAGTCCGTTATCAGCGTGAGAAACCAAATACAGC |
| | | | TCCCAATACCAGGATCCACCACAAACGCGGCACCGAGTCGGTGC |
| 4438 | SLC37A4_ | LegRNA_SLC37A4_ | GCAGCTCTGGATCCTGGTATGTTTAAGAGCTAGAAATAGCAAGTT |
| | G339C_85 | G339C_85_Linker6 | TAAATAAGGCTAGTCCGTTATCAGCGTGAGAAACCAAATACAGC |
| | | | TCCCAATACCAGGATCCACTTTCAAAACGCGGCACCGAGTCGGTG |
| | | | C |
| 4439 | SLC37A4_ | LegRNA_SLC37A4_ | GCAGCTCTGGATCCTGGTATGTTTAAGAGCTAGAAATAGCAAGTT |
| | G339C_85 | G339C_85_Linker8 | TAAATAAGGCTAGTCCGTTATCAGCGTGAGAAACCAAATACAGC |
| | | | TCCCAATACCAGGATCCACTTCGTTAAAACGCGGCACCGAGTCGG |
| | | | TGC |

Extended gRNA Cores

[0216] In some embodiments, a PEgRNA comprises a gRNA core that comprises one or more nucleotide insertions compared to a wild type CRISPR guide RNA scaffold sequence (e.g. a canonical SpCa9 guide RNA scaffold), i.e. an extended in length gRNA core. Potential advantages associated with such extended gRNA cores may include improved prime editing efficiency and/or improved manufacturing via a split synthesis scheme.

[0217] In some embodiments, the gRNA core comprises insertion of one or more nucleotides in the direct repeat compared to a wild type CRISPR guide RNA scaffold sequence as set forth in SEQ ID NO: 16. In some embodiments, the gRNA core comprises insertion of one or more nucleotides in the second stem loop compared to a canonical SpCas9 guide RNA scaffold sequence as set forth in SEQ ID NO: 16. Exemplary extended gRNA cores are provided in Tables 1 and 2. Although gRNA core sequences provided in Tables 1 and 2 are RNA sequences, “T” is used instead of “U” in the sequences for consistency with the ST.26 standard.

[0218] Components of a PEgRNA, e.g., an extended PEgRNA, may be synthesized by split synthesis, which refers to synthesizing two (or more) portions of a PEgRNA (e.g., a 5′ half of the PEgRNA and a 3′ half of the PEgRNA) separately and ligating the first half to a second half to form a full length PEgRNA. Exemplary “split” positions between the 5′ half and the 3′ half, e.g., in the direct repeat or in the second stem loop of a gRNA core, are shown in FIG. 8. Exemplary gRNA core sequences and corresponding first half and second half portions for split synthesis are shown in Table 2.

[0219] In certain embodiments, PEgRNAs provided herein comprise: i) a first sequence comprising a spacer that comprises a region of complementarity to a search target sequence in target strand of a double stranded target DNA, and a first half of a gRNA core; and ii) a second sequence comprising a second half of the gRNA core, an editing template that comprises an intended edit compared to the double stranded target DNA; a primer binding site (PBS) that comprises a region of complementarity to a region upstream of a nick site in a non-target strand of the double stranded target DNA; and, wherein the gRNA core comprises a direct repeat, a first stem loop, and a second stem loop.

[0220] In certain embodiments, PEgRNAs provided herein comprise i) a first sequence comprising an editing template that comprises an intended edit compared to the double stranded target DNA; a primer binding site (PBS) that comprises a region of complementarity to a region upstream of a nick site in a non-target strand of the double stranded target DNA; a spacer that comprises a region of complementarity to a search target sequence in target strand of a double stranded target DNA; and a first half of a gRNA core; and ii) a second sequence comprising a second half of a gRNA core, wherein the gRNA core comprises a direct repeat, a first stem loop, and a second stem loop.

[0221] In some embodiments, the first sequence is on a first RNA molecule and the second sequence is on a second RNA molecule. In some embodiments, the spacer and the first sequence and the second sequence are on the same RNA molecule. In some embodiments, the first half of the gRNA core and the second half of the gRNA core are selected from the paired first half gRNA core sequences and second half gRNA sequences provided in Table 2.

[0222] It should be appreciated that the first half and second half of the gRNA core may or may not be equal in length. In some embodiments, the first half of the gRNA core is at least five, at least 10, at least 15, at least 20 nucleotides, at least 25 nucleotides, at least 30 nucleotides, at least 35 nucleotides, at least 40 nucleotides, at least 45 nucleotides, at least 50 nucleotides, at least 55 nucleotides, at least 60 nucleotides, at least 65 nucleotides, at least 70 nucleotides, or at least 75 nucleotides in length. In some embodiments, the second half of the gRNA core is at least five, at least 10, at least 15, at least 20 nucleotides, at least 25 nucleotides, at least 30 nucleotides, at least 35 nucleotides, at least 40 nucleotides, at least 45 nucleotides, at least 50 nucleotides, at least 55 nucleotides, at least 60 nucleotides, at least 65 nucleotides, at least 70 nucleotides, or at least 75 nucleotides in length.

[0223] In some embodiments, the first half of the gRNA core is at least 80%, at least 85%, at least 90%, at least 95%, at least 99% identical to a sequence provided in Table 2. In some embodiments, the first half of the gRNA core is identical to a sequence provided in Table 2. In some embodiments, the second half of the gRNA core is at least 80%, at least 85%, at least 90%, at least 95%, at least 99% identical to a sequence provided in Table 2. In some embodiments, the second half of the gRNA core is identical to a sequence provided in Table 2.

[0224] As previously discussed, the gRNA core may comprise a direct repeat and/or one or multiple stem loops. In some embodiments, gRNA cores synthesize using split synthesis comprise a first half of a gRNA core comprising a first half of the direct repeat and a second half of a gRNA core comprising the second half of the direct repeat. In some embodiments, gRNA cores synthesizes using split synthesis comprises a first half of a gRNA core comprising a first half of the second stem loop and a second half of a gRNA core comprising the second half of the second stem loop.

TABLE 2
Exemplary gRNA core sequences

| SEQ | | | SEQ | | SEQ | | | Base | |
|---|---|---|---|---|---|---|---|---|---|
| ID | | | ID | Exemplary First half | ID | Exemplary Second half | Extended | Pairs of | Lenth |
| NO. | Name | gRNA core sequence | NO: | of the gRNA core | NO: | of the gRNA core | feature | Extension | (nts) |
| 3860 | L2_e3_ | GTTTAAGAGCTAGAA | 6378 | GTTTAAGAGCTAGA | 6536 | CTCGAAAGAGACGC | Stem loop | 3 | 82 |
| | 1 | ATAGCAAGTTTAAAT | | AATAGCAAGTTTAA | | GGCACCGAGTCGGT | 2 | | |
| | | AAGGCTAGTCCGTTAT | | ATAAGGCTAGTCCG | | GC | | | |
| | | CAGCGTCTCGAAAGA | | TTATCAGCGT | | | | | |
| | | GACGCGGCACCGAGT | | | | | | | |
| | | CGGTGC | | | | | | | |
| 3861 | L2_e3_ | GTTTAAGAGCTAGAA | 6379 | GTTTAAGAGCTAGA | 6537 | GCAGAAATGCACGC | Stem loop | 3 | 82 |
| | 2 | ATAGCAAGTTTAAAT | | AATAGCAAGTTTAA | | GGCACCGAGTCGGT | 2 | | |
| | | AAGGCTAGTCCGTTAT | | ATAAGGCTAGTCCG | | GC | | | |
| | | CAGCGTGCAGAAATG | | TTATCAGCGT | | | | | |
| | | CACGCGGCACCGAGT | | | | | | | |
| | | CGGTGC | | | | | | | |
| 3862 | L2_e3_ | GTTTAAGAGCTAGAA | 6380 | GTTTAAGAGCTAGA | 6538 | CCCGAAAGGGACGC | Stem loop | 3 | 82 |
| | 3 | ATAGCAAGTTTAAAT | | AATAGCAAGTTTAA | | GGCACCGAGTCGGT | 2 | | |
| | | AAGGCTAGTCCGTTAT | | ATAAGGCTAGTCCG | | GC | | | |
| | | CAGCGTCCCGAAAGG | | TTATCAGCGT | | | | | |
| | | GACGCGGCACCGAGT | | | | | | | |
| | | CGGTGC | | | | | | | |
| 3863 | L2_e3_ | GTTTAAGAGCTAGAA | 6381 | GTTTAAGAGCTAGA | 6539 | TGCGAAAGCAACGC | Stem loop | 3 | 82 |
| | 4 | ATAGCAAGTTTAAAT | | AATAGCAAGTTTAA | | GGCACCGAGTCGGT | 2 | | |
| | | AAGGCTAGTCCGTTAT | | ATAAGGCTAGTCCG | | GC | | | |
| | | CAGCGTTGCGAAAGC | | TTATCAGCGT | | | | | |
| | | AACGCGGCACCGAGT | | | | | | | |
| | | CGGTGC | | | | | | | |
| 3864 | L2_e3_ | GTTTAAGAGCTAGAA | 6382 | GTTTAAGAGCTAGA | 6540 | CACGAAAGTGACGC | Stem loop | 3 | 82 |
| | 5 | ATAGCAAGTTTAAAT | | AATAGCAAGTTTAA | | GGCACCGAGTCGGT | 2 | | |
| | | AAGGCTAGTCCGTTAT | | ATAAGGCTAGTCCG | | GC | | | |
| | | CAGCGTCACGAAAGT | | TTATCAGCGT | | | | | |
| | | GACGCGGCACCGAGT | | | | | | | |
| | | CGGTGC | | | | | | | |
| 3865 | L2_e3_ | GTTTAAGAGCTAGAA | 6383 | GTTTAAGAGCTAGA | 6541 | CCAGAAATGGACGC | Stem loop | 3 | 82 |
| | 6 | ATAGCAAGTTTAAAT | | AATAGCAAGTTTAA | | GGCACCGAGTCGGT | 2 | | |
| | | AAGGCTAGTCCGTTAT | | ATAAGGCTAGTCCG | | GC | | | |
| | | CAGCGTCCAGAAATG | | TTATCAGCGT | | | | | |
| | | GACGCGGCACCGAGT | | | | | | | |
| | | CGGTGC | | | | | | | |
| 3866 | L2_e3_ | GTTTAAGAGCTAGAA | 6384 | GTTTAAGAGCTAGA | 6542 | GCTGAAAAGCACGC | Stem loop | 3 | 82 |
| | 7 | ATAGCAAGTTTAAAT | | AATAGCAAGTTTAA | | GGCACCGAGTCGGT | 2 | | |
| | | AAGGCTAGTCCGTTAT | | ATAAGGCTAGTCCG | | GC | | | |
| | | CAGCGTGCTGAAAAG | | TTATCAGCGT | | | | | |
| | | CACGCGGCACCGAGT | | | | | | | |
| | | CGGTGC | | | | | | | |
| 3867 | L2_e3_ | GTTTAAGAGCTAGAA | 6385 | GTTTAAGAGCTAGA | 6543 | GTCGAAAGGCACGC | Stem loop | 3 | 82 |
| | 8 | ATAGCAAGTTTAAAT | | AATAGCAAGTTTAA | | GGCACCGAGTCGGT | 2 | | |
| | | AAGGCTAGTCCGTTAT | | ATAAGGCTAGTCCG | | GC | | | |
| | | CAGCGTGTCGAAAGG | | TTATCAGCGT | | | | | |
| | | CACGCGGCACCGAGT | | | | | | | |
| | | CGGTGC | | | | | | | |
| 3868 | L2_e3_ | GTTTAAGAGCTAGAA | 6386 | GTTTAAGAGCTAGA | 6544 | CGGGAAACCGACGC | Stem loop | 3 | 82 |
| | 9 | ATAGCAAGTTTAAAT | | AATAGCAAGTTTAA | | GGCACCGAGTCGGT | 2 | | |
| | | AAGGCTAGTCCGTTAT | | ATAAGGCTAGTCCG | | GC | | | |
| | | CAGCGTCGGGAAACC | | TTATCAGCGT | | | | | |
| | | GACGCGGCACCGAGT | | | | | | | |
| | | CGGTGC | | | | | | | |
| 3869 | L2_e3_ | GTTTAAGAGCTAGAA | 6387 | GTTTAAGAGCTAGA | 6545 | CAGGAAACTGACGC | Stem loop | 3 | 82 |
| | 10 | ATAGCAAGTTTAAAT | | AATAGCAAGTTTAA | | GGCACCGAGTCGGT | 2 | | |
| | | AAGGCTAGTCCGTTAT | | ATAAGGCTAGTCCG | | GC | | | |
| | | CAGCGTCAGGAAACT | | TTATCAGCGT | | | | | |
| | | GACGCGGCACCGAGT | | | | | | | |
| | | CGGTGC | | | | | | | |
| 3870 | L2_e3_ | GTTTAAGAGCTAGAA | 6388 | GTTTAAGAGCTAGA | 6546 | TCCGAAAGGAACGC | Stem loop | 3 | 82 |
| | 11 | ATAGCAAGTTTAAAT | | AATAGCAAGTTTAA | | GGCACCGAGTCGGT | 2 | | |
| | | AAGGCTAGTCCGTTAT | | ATAAGGCTAGTCCG | | GC | | | |
| | | CAGCGTTCCGAAAGG | | TTATCAGCGT | | | | | |
| | | AACGCGGCACCGAGT | | | | | | | |
| | | CGGTGC | | | | | | | |
| 3871 | L2_e3_ | GTTTAAGAGCTAGAA | 6389 | GTTTAAGAGCTAGA | 6547 | GGGGAAACCCACGC | Stem loop | 3 | 82 |
| | 12 | ATAGCAAGTTTAAAT | | AATAGCAAGTTTAA | | GGCACCGAGTCGGT | 2 | | |
| | | AAGGCTAGTCCGTTAT | | ATAAGGCTAGTCCG | | GC | | | |
| | | CAGCGTGGGGAAACC | | TTATCAGCGT | | | | | |
| | | CACGCGGCACCGAGT | | | | | | | |
| | | CGGTGC | | | | | | | |
| 3872 | L2_e3_ | GTTTAAGAGCTAGAA | 6390 | GTTTAAGAGCTAGA | 6548 | AGCGAAAGCTACGC | Stem loop | 3 | 82 |
| | 13 | ATAGCAAGTTTAAAT | | AATAGCAAGTTTAA | | GGCACCGAGTCGGT | 2 | | |
| | | AAGGCTAGTCCGTTAT | | ATAAGGCTAGTCCG | | GC | | | |
| | | CAGCGTAGCGAAAGC | | TTATCAGCGT | | | | | |
| | | TACGCGGCACCGAGT | | | | | | | |
| | | CGGTGC | | | | | | | |
| 3873 | L2_e3_ | GTTTAAGAGCTAGAA | 6391 | GTTTAAGAGCTAGA | 6549 | GTGGAAACACACGC | Stem loop | 3 | 82 |
| | 14 | ATAGCAAGTTTAAAT | | AATAGCAAGTTTAA | | GGCACCGAGTCGGT | 2 | | |
| | | AAGGCTAGTCCGTTAT | | ATAAGGCTAGTCCG | | GC | | | |
| | | CAGCGTGTGGAAACA | | TTATCAGCGT | | | | | |
| | | CACGCGGCACCGAGT | | | | | | | |
| | | CGGTGC | | | | | | | |
| 3874 | L2_e3_ | GTTTAAGAGCTAGAA | 6392 | GTTTAAGAGCTAGA | 6550 | GCCGAAAGGCACGC | Stem loop | 3 | 82 |
| | 15 | ATAGCAAGTTTAAAT | | AATAGCAAGTTTAA | | GGCACCGAGTCGGT | 2 | | |
| | | AAGGCTAGTCCGTTAT | | ATAAGGCTAGTCCG | | GC | | | |
| | | CAGCGTGCCGAAAGG | | TTATCAGCGT | | | | | |
| | | CACGCGGCACCGAGT | | | | | | | |
| | | CGGTGC | | | | | | | |
| 3875 | L2_e3_ | GTTTAAGAGCTAGAA | 6393 | GTTTAAGAGCTAGA | 6551 | CGTGAAAACGACGC | Stem loop | 3 | 82 |
| | 16 | ATAGCAAGTTTAAAT | | AATAGCAAGTTTAA | | GGCACCGAGTCGGT | 2 | | |
| | | AAGGCTAGTCCGTTAT | | ATAAGGCTAGTCCG | | GC | | | |
| | | CAGCGTCGTGAAAAC | | TTATCAGCGT | | | | | |
| | | GACGCGGCACCGAGT | | | | | | | |
| | | CGGTGC | | | | | | | |
| 3876 | L2_e3_ | GTTTAAGAGCTAGAA | 6394 | GTTTAAGAGCTAGA | 6552 | ACCGAAAGGTACGC | Stem loop | 3 | 82 |
| | 17 | ATAGCAAGTTTAAAT | | AATAGCAAGTTTAA | | GGCACCGAGTCGGT | 2 | | |
| | | AAGGCTAGTCCGTTAT | | ATAAGGCTAGTCCG | | GC | | | |
| | | CAGCGTACCGAAAGG | | TTATCAGCGT | | | | | |
| | | TACGCGGCACCGAGT | | | | | | | |
| | | CGGTGC | | | | | | | |
| 3877 | L2_e3_ | GTTTAAGAGCTAGAA | 6395 | GTTTAAGAGCTAGA | 6553 | CCTGAAAAGGACGC | Stem loop | 3 | 82 |
| | 18 | ATAGCAAGTTTAAAT | | AATAGCAAGTTTAA | | GGCACCGAGTCGGT | 2 | | |
| | | AAGGCTAGTCCGTTAT | | ATAAGGCTAGTCCG | | GC | | | |
| | | CAGCGTCCTGAAAAG | | TTATCAGCGT | | | | | |
| | | GACGCGGCACCGAGT | | | | | | | |
| | | CGGTGC | | | | | | | |
| 3878 | L2_e3_ | GTTTAAGAGCTAGAA | 6396 | GTTTAAGAGCTAGA | 6554 | CCGGAAACGGACGC | Stem loop | 3 | 82 |
| | 19 | ATAGCAAGTTTAAAT | | AATAGCAAGTTTAA | | GGCACCGAGTCGGT | 2 | | |
| | | AAGGCTAGTCCGTTAT | | ATAAGGCTAGTCCG | | GC | | | |
| | | CAGCGTCCGGAAACG | | TTATCAGCGT | | | | | |
| | | GACGCGGCACCGAGT | | | | | | | |
| | | CGGTGC | | | | | | | |
| 3879 | L2_e3_ | GTTTAAGAGCTAGAA | 6397 | GTTTAAGAGCTAGA | 6555 | ACGGAAACGTACGC | Stem loop | 3 | 82 |
| | 20 | ATAGCAAGTTTAAAT | | AATAGCAAGTTTAA | | GGCACCGAGTCGGT | 2 | | |
| | | AAGGCTAGTCCGTTAT | | ATAAGGCTAGTCCG | | GC | | | |
| | | CAGCGTACGGAAACG | | TTATCAGCGT | | | | | |
| | | TACGCGGCACCGAGT | | | | | | | |
| | | CGGTGC | | | | | | | |
| 3880 | L2_e3_ | GTTTAAGAGCTAGAA | 6398 | GTTTAAGAGCTAGA | 6556 | GCGGAAACGCACGC | Stem loop | 3 | 82 |
| | 21 | ATAGCAAGTTTAAAT | | AATAGCAAGTTTAA | | GGCACCGAGTCGGT | 2 | | |
| | | AAGGCTAGTCCGTTAT | | ATAAGGCTAGTCCG | | GC | | | |
| | | CAGCGTGCGGAAACG | | TTATCAGCGT | | | | | |
| | | CACGCGGCACCGAGT | | | | | | | |
| | | CGGTGC | | | | | | | |
| 3881 | L2_e3_ | GTTTAAGAGCTAGAA | 6399 | GTTTAAGAGCTAGA | 6557 | CTGGAAACAGACGC | Stem loop | 3 | 82 |
| | 22 | ATAGCAAGTTTAAAT | | AATAGCAAGTTTAA | | GGCACCGAGTCGGT | 2 | | |
| | | AAGGCTAGTCCGTTAT | | ATAAGGCTAGTCCG | | GC | | | |
| | | CAGCGTCTGGAAACA | | TTATCAGCGT | | | | | |
| | | GACGCGGCACCGAGT | | | | | | | |
| | | CGGTGC | | | | | | | |
| 3882 | L2_e3 | GTTTAAGAGCTAGAA | 6400 | GTTTAAGAGCTAGA | 6558 | GGGGAAACTCACGC | Stem loop | 3 | 82 |
| | 23 | ATAGCAAGTTTAAAT | | AATAGCAAGTTTAA | | GGCACCGAGTCGGT | 2 | | |
| | | AAGGCTAGTCCGTTAT | | ATAAGGCTAGTCCG | | GC | | | |
| | | CAGCGTGGGGAAACT | | TTATCAGCGT | | | | | |
| | | CACGCGGCACCGAGT | | | | | | | |
| | | CGGTGC | | | | | | | |
| 3883 | L2_e3_ | GTTTAAGAGCTAGAA | 6401 | GTTTAAGAGCTAGA | 6559 | CCGGAAATGGACGC | Stem loop | 3 | 82 |
| | 24 | ATAGCAAGTTTAAAT | | AATAGCAAGTTTAA | | GGCACCGAGTCGGT | 2 | | |
| | | AAGGCTAGTCCGTTAT | | ATAAGGCTAGTCCG | | GC | | | |
| | | CAGCGTCCGGAAATG | | TTATCAGCGT | | | | | |
| | | GACGCGGCACCGAGT | | | | | | | |
| | | CGGTGC | | | | | | | |
| 3884 | L2_e3_ | GTTTAAGAGCTAGAA | 6402 | GTTTAAGAGCTAGA | 6560 | CGTGAAAGCGACGC | Stem loop | 3 | 82 |
| | 25 | ATAGCAAGTTTAAAT | | AATAGCAAGTTTAA | | GGCACCGAGTCGGT | 2 | | |
| | | AAGGCTAGTCCGTTAT | | ATAAGGCTAGTCCG | | GC | | | |
| | | CAGCGTCGTGAAAGC | | TTATCAGCGT | | | | | |
| | | GACGCGGCACCGAGT | | | | | | | |
| | | CGGTGC | | | | | | | |
| 3885 | L2_e4_ | GTTTAAGAGCTAGAA | 6403 | GTTTAAGAGCTAGA | 6561 | GTGGAAACACAACG | Stem loop | 4 | 84 |
| | 1 | ATAGCAAGTTTAAAT | | AATAGCAAGTTTAA | | CGGCACCGAGTCGG | 2 | | |
| | | AAGGCTAGTCCGTTAT | | ATAAGGCTAGTCCG | | TGC | | | |
| | | CAGCGTTGTGGAAAC | | TTATCAGCGTt | | | | | |
| | | ACAACGCGGCACCGA | | | | | | | |
| | | GTCGGTGC | | | | | | | |
| 3886 | L2_e4_ | GTTTAAGAGCTAGAA | 6404 | GTTTAAGAGCTAGA | 6562 | CAGGAAACTGTACG | Stem loop | 4 | 84 |
| | 2 | ATAGCAAGTTTAAAT | | AATAGCAAGTTTAA | | CGGCACCGAGTCGG | 2 | | |
| | | AAGGCTAGTCCGTTAT | | ATAAGGCTAGTCCG | | TGC | | | |
| | | CAGCGTACAGGAAAC | | TTATCAGCGTa | | | | | |
| | | TGTACGCGGCACCGA | | | | | | | |
| | | GTCGGTGC | | | | | | | |
| 3887 | L2_e4_ | GTTTAAGAGCTAGAA | 6405 | GTTTAAGAGCTAGA | 6563 | GAAGAAATTCGACG | Stem loop | 4 | 84 |
| | 3 | ATAGCAAGTTTAAAT | | AATAGCAAGTTTAA | | CGGCACCGAGTCGG | 2 | | |
| | | AAGGCTAGTCCGTTAT | | ATAAGGCTAGTCCG | | TGC | | | |
| | | CAGCGTCGAAGAAAT | | TTATCAGCGTc | | | | | |
| | | TCGACGCGGCACCGA | | | | | | | |
| | | GTCGGTGC | | | | | | | |
| 3888 | L2_e4_ | GTTTAAGAGCTAGAA | 6406 | GTTTAAGAGCTAGA | 6564 | ACCGAAAGGTAACG | Stem loop | 4 | 84 |
| | 4 | ATAGCAAGTTTAAAT | | AATAGCAAGTTTAA | | CGGCACCGAGTCGG | 2 | | |
| | | AAGGCTAGTCCGTTAT | | ATAAGGCTAGTCCG | | TGC | | | |
| | | CAGCGTTACCGAAAG | | TTATCAGCGTt | | | | | |
| | | GTAACGCGGCACCGA | | | | | | | |
| | | GTCGGTGC | | | | | | | |
| 3889 | L2_e4_ | GTTTAAGAGCTAGAA | 6407 | GTTTAAGAGCTAGA | 6565 | CCGGAAACGGCACG | Stem loop | 4 | 84 |
| | 5 | ATAGCAAGTTTAAAT | | AATAGCAAGTTTAA | | CGGCACCGAGTCGG | 2 | | |
| | | AAGGCTAGTCCGTTAT | | ATAAGGCTAGTCCG | | TGC | | | |
| | | CAGCGTGCCGGAAAC | | TTATCAGCGTg | | | | | |
| | | GGCACGCGGCACCGA | | | | | | | |
| | | GTCGGTGC | | | | | | | |
| 3890 | L2_e4_ | GTTTAAGAGCTAGAA | 6408 | GTTTAAGAGCTAGA | 6566 | AACGAAAGTTGACG | Stem loop | 4 | 84 |
| | 6 | ATAGCAAGTTTAAAT | | AATAGCAAGTTTAA | | CGGCACCGAGTCGG | 2 | | |
| | | AAGGCTAGTCCGTTAT | | ATAAGGCTAGTCCG | | TGC | | | |
| | | CAGCGTCAACGAAAG | | TTATCAGCGTc | | | | | |
| | | TTGACGCGGCACCGA | | | | | | | |
| | | GTCGGTGC | | | | | | | |
| 3891 | L2_e4_ | GTTTAAGAGCTAGAA | 6409 | GTTTAAGAGCTAGA | 6567 | GGCGAAAGCTAACG | Stem loop | 4 | 84 |
| | 7 | ATAGCAAGTTTAAAT | | AATAGCAAGTTTAA | | CGGCACCGAGTCGG | 2 | | |
| | | AAGGCTAGTCCGTTAT | | ATAAGGCTAGTCCG | | TGC | | | |
| | | CAGCGTTGGCGAAAG | | TTATCAGCGTt | | | | | |
| | | CTAACGCGGCACCGA | | | | | | | |
| | | GTCGGTGC | | | | | | | |
| 3892 | L2_e4_ | GTTTAAGAGCTAGAA | 6410 | GTTTAAGAGCTAGA | 6568 | AGCGAAAGCTAACG | Stem loop | 4 | 84 |
| | 8 | ATAGCAAGTTTAAAT | | AATAGCAAGTTTAA | | CGGCACCGAGTCGG | 2 | | |
| | | AAGGCTAGTCCGTTAT | | ATAAGGCTAGTCCG | | TGC | | | |
| | | CAGCGTTAGCGAAAG | | TTATCAGCGTt | | | | | |
| | | CTAACGCGGCACCGA | | | | | | | |
| | | GTCGGTGC | | | | | | | |
| 3893 | L2_e4_ | GTTTAAGAGCTAGAA | 6411 | GTTTAAGAGCTAGA | 6569 | GTCGAAAGACCACG | Stem loop | 4 | 84 |
| | 9 | ATAGCAAGTTTAAAT | | AATAGCAAGTTTAA | | CGGCACCGAGTCGG | 2 | | |
| | | AAGGCTAGTCCGTTAT | | ATAAGGCTAGTCCG | | TGC | | | |
| | | CAGCGTGGTCGAAAG | | TTATCAGCGTg | | | | | |
| | | ACCACGCGGCACCGA | | | | | | | |
| | | GTCGGTGC | | | | | | | |
| 3894 | L2_e4_ | GTTTAAGAGCTAGAA | 6412 | GTTTAAGAGCTAGA | 6570 | CGCGAAAGCGTACG | Stem loop | 4 | 84 |
| | 10 | ATAGCAAGTTTAAAT | | AATAGCAAGTTTAA | | CGGCACCGAGTCGG | 2 | | |
| | | AAGGCTAGTCCGTTAT | | ATAAGGCTAGTCCG | | TGC | | | |
| | | CAGCGTACGCGAAAG | | TTATCAGCGTa | | | | | |
| | | CGTACGCGGCACCGA | | | | | | | |
| | | GTCGGTGC | | | | | | | |
| 3895 | L2_e4_ | GTTTAAGAGCTAGAA | 6413 | GTTTAAGAGCTAGA | 6571 | GTGGAAACATCACG | Stem loop | 4 | 84 |
| | 11 | ATAGCAAGTTTAAAT | | AATAGCAAGTTTAA | | CGGCACCGAGTCGG | 2 | | |
| | | AAGGCTAGTCCGTTAT | | ATAAGGCTAGTCCG | | TGC | | | |
| | | CAGCGTGGTGGAAAC | | TTATCAGCGTg | | | | | |
| | | ATCACGCGGCACCGA | | | | | | | |
| | | GTCGGTGC | | | | | | | |
| 3896 | L2_e4_ | GTTTAAGAGCTAGAA | 6414 | GTTTAAGAGCTAGA | 6572 | GTGGAAACACGACG | Stem loop | 4 | 84 |
| | 12 | ATAGCAAGTTTAAAT | | AATAGCAAGTTTAA | | CGGCACCGAGTCGG | 2 | | |
| | | AAGGCTAGTCCGTTAT | | ATAAGGCTAGTCCG | | TGC | | | |
| | | CAGCGTCGTGGAAAC | | TTATCAGCGTc | | | | | |
| | | ACGACGCGGCACCGA | | | | | | | |
| | | GTCGGTGC | | | | | | | |
| 3897 | L2_e4_ | GTTTAAGAGCTAGAA | 6415 | GTTTAAGAGCTAGA | 6573 | ACTGAAAAGTCACG | Stem loop | 4 | 84 |
| | 13 | ATAGCAAGTTTAAAT | | AATAGCAAGTTTAA | | CGGCACCGAGTCGG | 2 | | |
| | | AAGGCTAGTCCGTTAT | | ATAAGGCTAGTCCG | | TGC | | | |
| | | CAGCGTGACTGAAAA | | TTATCAGCGTg | | | | | |
| | | GTCACGCGGCACCGA | | | | | | | |
| | | GTCGGTGC | | | | | | | |
| 3898 | L2_e4_ | GTTTAAGAGCTAGAA | 6416 | GTTTAAGAGCTAGA | 6574 | GCAGAAATGCTACG | Stem loop | 4 | 84 |
| | 14 | ATAGCAAGTTTAAAT | | AATAGCAAGTTTAA | | CGGCACCGAGTCGG | 2 | | |
| | | AAGGCTAGTCCGTTAT | | ATAAGGCTAGTCCG | | TGC | | | |
| | | CAGCGTAGCAGAAAT | | TTATCAGCGTa | | | | | |
| | | GCTACGCGGCACCGA | | | | | | | |
| | | GTCGGTGC | | | | | | | |
| 3899 | L2_e4_ | GTTTAAGAGCTAGAA | 6417 | GTTTAAGAGCTAGA | 6575 | TGCGAAAGCAGACG | Stem loop | 4 | 84 |
| | 15 | ATAGCAAGTTTAAAT | | AATAGCAAGTTTAA | | CGGCACCGAGTCGG | 2 | | |
| | | AAGGCTAGTCCGTTAT | | ATAAGGCTAGTCCG | | TGC | | | |
| | | CAGCGTTTGCGAAAG | | TTATCAGCGTt | | | | | |
| | | CAGACGCGGCACCGA | | | | | | | |
| | | GTCGGTGC | | | | | | | |
| 3900 | L2_e4_ | GTTTAAGAGCTAGAA | 6418 | GTTTAAGAGCTAGA | 6576 | TTCGAAAGAGGACG | Stem loop | 4 | 84 |
| | 16 | ATAGCAAGTTTAAAT | | AATAGCAAGTTTAA | | CGGCACCGAGTCGG | 2 | | |
| | | AAGGCTAGTCCGTTAT | | ATAAGGCTAGTCCG | | TGC | | | |
| | | CAGCGTCTTCGAAAG | | TTATCAGCGTc | | | | | |
| | | AGGACGCGGCACCGA | | | | | | | |
| | | GTCGGTGC | | | | | | | |
| 3901 | L2_e4_ | GTTTAAGAGCTAGAA | 6419 | GTTTAAGAGCTAGA | 6577 | GGGGAAACCTGACG | Stem loop | 4 | 84 |
| | 17 | ATAGCAAGTTTAAAT | | AATAGCAAGTTTAA | | CGGCACCGAGTCGG | 2 | | |
| | | AAGGCTAGTCCGTTAT | | ATAAGGCTAGTCCG | | TGC | | | |
| | | CAGCGTCGGGGAAAC | | TTATCAGCGTc | | | | | |
| | | CTGACGCGGCACCGA | | | | | | | |
| | | GTCGGTGC | | | | | | | |
| 3902 | L2_e4_ | GTTTAAGAGCTAGAA | 6420 | GTTTAAGAGCTAGA | 6578 | GCGGAAACGCTACG | Stem loop | 4 | 84 |
| | 18 | ATAGCAAGTTTAAAT | | AATAGCAAGTTTAA | | CGGCACCGAGTCGG | 2 | | |
| | | AAGGCTAGTCCGTTAT | | ATAAGGCTAGTCCG | | TGC | | | |
| | | CAGCGTAGCGGAAAC | | TTATCAGCGTa | | | | | |
| | | GCTACGCGGCACCGA | | | | | | | |
| | | GTCGGTGC | | | | | | | |
| 3903 | L2_e4_ | GTTTAAGAGCTAGAA | 6421 | GTTTAAGAGCTAGA | 6579 | ACCGAAAGGTGACG | Stem loop | 4 | 84 |
| | 19 | ATAGCAAGTTTAAAT | | AATAGCAAGTTTAA | | CGGCACCGAGTCGG | 2 | | |
| | | AAGGCTAGTCCGTTAT | | ATAAGGCTAGTCCG | | TGC | | | |
| | | CAGCGTCACCGAAAG | | TTATCAGCGTc | | | | | |
| | | GTGACGCGGCACCGA | | | | | | | |
| | | GTCGGTGC | | | | | | | |
| 3904 | L2_e4_ | GTTTAAGAGCTAGAA | 6422 | GTTTAAGAGCTAGA | 6580 | GCGGAAACGCCACG | Stem loop | 4 | 84 |
| | 20 | ATAGCAAGTTTAAAT | | AATAGCAAGTTTAA | | CGGCACCGAGTCGG | 2 | | |
| | | AAGGCTAGTCCGTTAT | | ATAAGGCTAGTCCG | | TGC | | | |
| | | CAGCGTGGCGGAAAC | | TTATCAGCGTg | | | | | |
| | | GCCACGCGGCACCGA | | | | | | | |
| | | GTCGGTGC | | | | | | | |
| 3905 | L2_e4_ | GTTTAAGAGCTAGAA | 6423 | GTTTAAGAGCTAGA | 6581 | TACGAAAGTAGACG | Stem loop | 4 | 84 |
| | 21 | ATAGCAAGTTTAAAT | | AATAGCAAGTTTAA | | CGGCACCGAGTCGG | 2 | | |
| | | AAGGCTAGTCCGTTAT | | ATAAGGCTAGTCCG | | TGC | | | |
| | | CAGCGTCTACGAAAG | | TTATCAGCGTc | | | | | |
| | | TAGACGCGGCACCGA | | | | | | | |
| | | GTCGGTGC | | | | | | | |
| 3906 | L2_e4 | GTTTAAGAGCTAGAA | 6424 | GTTTAAGAGCTAGA | 6582 | CCTGAAAAGGCACG | Stem loop | 4 | 84 |
| | 22 | ATAGCAAGTTTAAAT | | AATAGCAAGTTTAA | | CGGCACCGAGTCGG | 2 | | |
| | | AAGGCTAGTCCGTTAT | | ATAAGGCTAGTCCG | | TGC | | | |
| | | CAGCGTGCCTGAAAA | | TTATCAGCGTg | | | | | |
| | | GGCACGCGGCACCGA | | | | | | | |
| | | GTCGGTGC | | | | | | | |
| 3907 | L2_e4_ | GTTTAAGAGCTAGAA | 6425 | GTTTAAGAGCTAGA | 6583 | TGCGAAAGCACACG | Stem loop | 4 | 84 |
| | 23 | ATAGCAAGTTTAAAT | | AATAGCAAGTTTAA | | CGGCACCGAGTCGG | 2 | | |
| | | AAGGCTAGTCCGTTAT | | ATAAGGCTAGTCCG | | TGC | | | |
| | | CAGCGTGTGCGAAAG | | TTATCAGCGTg | | | | | |
| | | CACACGCGGCACCGA | | | | | | | |
| | | GTCGGTGC | | | | | | | |
| 3908 | L2_e4_ | GTTTAAGAGCTAGAA | 6426 | GTTTAAGAGCTAGA | 6584 | TGAGAAATCACACG | Stem loop | 4 | 84 |
| | 24 | ATAGCAAGTTTAAAT | | AATAGCAAGTTTAA | | CGGCACCGAGTCGG | 2 | | |
| | | AAGGCTAGTCCGTTAT | | ATAAGGCTAGTCCG | | TGC | | | |
| | | CAGCGTGTGAGAAAT | | TTATCAGCGTg | | | | | |
| | | CACACGCGGCACCGA | | | | | | | |
| | | GTCGGTGC | | | | | | | |
| 3909 | L2_e4_ | GTTTAAGAGCTAGAA | 6427 | GTTTAAGAGCTAGA | 6585 | CAGGAAACTGCACG | Stem loop | 4 | 84 |
| | 25 | ATAGCAAGTTTAAAT | | AATAGCAAGTTTAA | | CGGCACCGAGTCGG | 2 | | |
| | | AAGGCTAGTCCGTTAT | | ATAAGGCTAGTCCG | | TGC | | | |
| | | CAGCGTGCAGGAAAC | | TTATCAGCGTg | | | | | |
| | | TGCACGCGGCACCGA | | | | | | | |
| | | GTCGGTGC | | | | | | | |
| 3910 | L2_e4_ | GTTTAAGAGCTAGAA | 6428 | GTTTAAGAGCTAGA | 6586 | CTCGAAAGAGAACG | Stem loop | 4 | 84 |
| | 26 | ATAGCAAGTTTAAAT | | AATAGCAAGTTTAA | | CGGCACCGAGTCGG | 2 | | |
| | | AAGGCTAGTCCGTTAT | | ATAAGGCTAGTCCG | | TGC | | | |
| | | CAGCGTTCTCGAAAG | | TTATCAGCGTt | | | | | |
| | | AGAACGCGGCACCGA | | | | | | | |
| | | GTCGGTGC | | | | | | | |
| 3911 | L2_e4_ | GTTTAAGAGCTAGAA | 6429 | GTTTAAGAGCTAGA | 6587 | CCCGAAAGGGCACG | Stem loop | 4 | 84 |
| | 27 | ATAGCAAGTTTAAAT | | AATAGCAAGTTTAA | | CGGCACCGAGTCGG | 2 | | |
| | | AAGGCTAGTCCGTTAT | | ATAAGGCTAGTCCG | | TGC | | | |
| | | CAGCGTGCCCGAAAG | | TTATCAGCGTg | | | | | |
| | | GGCACGCGGCACCGA | | | | | | | |
| | | GTCGGTGC | | | | | | | |
| 3912 | L2_e4_ | GTTTAAGAGCTAGAA | 6430 | GTTTAAGAGCTAGA | 6588 | ACCGAAAGGTTACG | Stem loop | 4 | 84 |
| | 28 | ATAGCAAGTTTAAAT | | AATAGCAAGTTTAA | | CGGCACCGAGTCGG | 2 | | |
| | | AAGGCTAGTCCGTTAT | | ATAAGGCTAGTCCG | | TGC | | | |
| | | CAGCGTAACCGAAAG | | TTATCAGCGTa | | | | | |
| | | GTTACGCGGCACCGA | | | | | | | |
| | | GTCGGTGC | | | | | | | |
| 3913 | L2_e4_ | GTTTAAGAGCTAGAA | 6431 | GTTTAAGAGCTAGA | 6589 | CTGGAAACAGTACG | Stem loop | 4 | 84 |
| | 29 | ATAGCAAGTTTAAAT | | AATAGCAAGTTTAA | | CGGCACCGAGTCGG | 2 | | |
| | | AAGGCTAGTCCGTTAT | | ATAAGGCTAGTCCG | | TGC | | | |
| | | CAGCGTACTGGAAAC | | TTATCAGCGTa | | | | | |
| | | AGTACGCGGCACCGA | | | | | | | |
| | | GTCGGTGC | | | | | | | |
| 3914 | L2_e4_ | GTTTAAGAGCTAGAA | 6432 | GTTTAAGAGCTAGA | 6590 | GGCGAAAGCCGACG | Stem loop | 4 | 84 |
| | 30 | ATAGCAAGTTTAAAT | | AATAGCAAGTTTAA | | CGGCACCGAGTCGG | 2 | | |
| | | AAGGCTAGTCCGTTAT | | ATAAGGCTAGTCCG | | TGC | | | |
| | | CAGCGTCGGCGAAAG | | TTATCAGCGTc | | | | | |
| | | CCGACGCGGCACCGA | | | | | | | |
| | | GTCGGTGC | | | | | | | |
| 3915 | L2_e4_ | GTTTAAGAGCTAGAA | 6433 | GTTTAAGAGCTAGA | 6591 | GCCGAAAGGCTACG | Stem loop | 4 | 84 |
| | 31 | ATAGCAAGTTTAAAT | | AATAGCAAGTTTAA | | CGGCACCGAGTCGG | 2 | | |
| | | AAGGCTAGTCCGTTAT | | ATAAGGCTAGTCCG | | TGC | | | |
| | | CAGCGTAGCCGAAAG | | TTATCAGCGTa | | | | | |
| | | GCTACGCGGCACCGA | | | | | | | |
| | | GTCGGTGC | | | | | | | |
| 3916 | L2_e4_ | GTTTAAGAGCTAGAA | 6434 | GTTTAAGAGCTAGA | 6592 | ACAGAAATGTCACG | Stem loop | 4 | 84 |
| | 32 | ATAGCAAGTTTAAAT | | AATAGCAAGTTTAA | | CGGCACCGAGTCGG | 2 | | |
| | | AAGGCTAGTCCGTTAT | | ATAAGGCTAGTCCG | | TGC | | | |
| | | CAGCGTGACAGAAAT | | TTATCAGCGTg | | | | | |
| | | GTCACGCGGCACCGA | | | | | | | |
| | | GTCGGTGC | | | | | | | |
| 3917 | L2_e4_ | GTTTAAGAGCTAGAA | 6435 | GTTTAAGAGCTAGA | 6593 | GTCGAAAGACGACG | Stem loop | 4 | 84 |
| | 33 | ATAGCAAGTTTAAAT | | AATAGCAAGTTTAA | | CGGCACCGAGTCGG | 2 | | |
| | | AAGGCTAGTCCGTTAT | | ATAAGGCTAGTCCG | | TGC | | | |
| | | CAGCGTTGTCGAAAG | | TTATCAGCGTt | | | | | |
| | | ACGACGCGGCACCGA | | | | | | | |
| | | GTCGGTGC | | | | | | | |
| 3918 | L2_e4_ | GTTTAAGAGCTAGAA | 6436 | GTTTAAGAGCTAGA | 6594 | CACGAAAGTGGACG | Stem loop | 4 | 84 |
| | 34 | ATAGCAAGTTTAAAT | | AATAGCAAGTTTAA | | CGGCACCGAGTCGG | 2 | | |
| | | AAGGCTAGTCCGTTAT | | ATAAGGCTAGTCCG | | TGC | | | |
| | | CAGCGTCCACGAAAG | | TTATCAGCGTc | | | | | |
| | | TGGACGCGGCACCGA | | | | | | | |
| | | GTCGGTGC | | | | | | | |
| 3919 | L2_e4_ | GTTTAAGAGCTAGAA | 6437 | GTTTAAGAGCTAGA | 6595 | ACGGAAACGTCACG | Stem loop | 4 | 84 |
| | 35 | ATAGCAAGTTTAAAT | | AATAGCAAGTTTAA | | CGGCACCGAGTCGG | 2 | | |
| | | AAGGCTAGTCCGTTAT | | ATAAGGCTAGTCCG | | TGC | | | |
| | | CAGCGTGACGGAAAC | | TTATCAGCGTg | | | | | |
| | | GTCACGCGGCACCGA | | | | | | | |
| | | GTCGGTGC | | | | | | | |
| 3920 | L2_e4_ | GTTTAAGAGCTAGAA | 6438 | GTTTAAGAGCTAGA | 6596 | GTGGAAACACCACG | Stem loop | 4 | 84 |
| | 36 | ATAGCAAGTTTAAAT | | AATAGCAAGTTTAA | | CGGCACCGAGTCGG | 2 | | |
| | | AAGGCTAGTCCGTTAT | | ATAAGGCTAGTCCG | | TGC | | | |
| | | CAGCGTGGTGGAAAC | | TTATCAGCGTg | | | | | |
| | | ACCACGCGGCACCGA | | | | | | | |
| | | GTCGGTGC | | | | | | | |
| 3921 | L2_e4_ | GTTTAAGAGCTAGAA | 6439 | GTTTAAGAGCTAGA | 6597 | AAGGAAACTTCACG | Stem loop | 4 | 84 |
| | 37 | ATAGCAAGTTTAAAT | | AATAGCAAGTTTAA | | CGGCACCGAGTCGG | 2 | | |
| | | AAGGCTAGTCCGTTAT | | ATAAGGCTAGTCCG | | TGC | | | |
| | | CAGCGTGAAGGAAAC | | TTATCAGCGTg | | | | | |
| | | TTCACGCGGCACCGA | | | | | | | |
| | | GTCGGTGC | | | | | | | |
| 3922 | L2_e4_ | GTTTAAGAGCTAGAA | 6440 | GTTTAAGAGCTAGA | 6598 | CCCGAAAGGGGACG | Stem loop | 4 | 84 |
| | 38 | ATAGCAAGTTTAAAT | | AATAGCAAGTTTAA | | CGGCACCGAGTCGG | 2 | | |
| | | AAGGCTAGTCCGTTAT | | ATAAGGCTAGTCCG | | TGC | | | |
| | | CAGCGTCCCCGAAAG | | TTATCAGCGTc | | | | | |
| | | GGGACGCGGCACCGA | | | | | | | |
| | | GTCGGTGC | | | | | | | |
| 3923 | L2_e4_ | GTTTAAGAGCTAGAA | 6441 | GTTTAAGAGCTAGA | 6599 | TGTGAAAACGCACG | Stem loop | 4 | 84 |
| | 39 | ATAGCAAGTTTAAAT | | AATAGCAAGTTTAA | | CGGCACCGAGTCGG | 2 | | |
| | | AAGGCTAGTCCGTTAT | | ATAAGGCTAGTCCG | | TGC | | | |
| | | CAGCGTGTGTGAAAA | | TTATCAGCGTg | | | | | |
| | | CGCACGCGGCACCGA | | | | | | | |
| | | GTCGGTGC | | | | | | | |
| 3924 | L2_e4_ | GTTTAAGAGCTAGAA | 6442 | GTTTAAGAGCTAGA | 6600 | CGGGAAACCGCACG | Stem loop | 4 | 84 |
| | 40 | ATAGCAAGTTTAAAT | | AATAGCAAGTTTAA | | CGGCACCGAGTCGG | 2 | | |
| | | AAGGCTAGTCCGTTAT | | ATAAGGCTAGTCCG | | TGC | | | |
| | | CAGCGTGCGGGAAAC | | TTATCAGCGTg | | | | | |
| | | CGCACGCGGCACCGA | | | | | | | |
| | | GTCGGTGC | | | | | | | |
| 3925 | L2_e4_ | GTTTAAGAGCTAGAA | 6443 | GTTTAAGAGCTAGA | 6601 | GAGGAAACTCAACG | Stem loop | 4 | 84 |
| | 41 | ATAGCAAGTTTAAAT | | AATAGCAAGTTTAA | | CGGCACCGAGTCGG | 2 | | |
| | | AAGGCTAGTCCGTTAT | | ATAAGGCTAGTCCG | | TGC | | | |
| | | CAGCGTTGAGGAAAC | | TTATCAGCGTt | | | | | |
| | | TCAACGCGGCACCGA | | | | | | | |
| | | GTCGGTGC | | | | | | | |
| 3926 | L2_e4_ | GTTTAAGAGCTAGAA | 6444 | GTTTAAGAGCTAGA | 6602 | CGGGAAACCGTACG | Stem loop | 4 | 84 |
| | 42 | ATAGCAAGTTTAAAT | | AATAGCAAGTTTAA | | CGGCACCGAGTCGG | 2 | | |
| | | AAGGCTAGTCCGTTAT | | ATAAGGCTAGTCCG | | TGC | | | |
| | | CAGCGTACGGGAAAC | | TTATCAGCGTa | | | | | |
| | | CGTACGCGGCACCGA | | | | | | | |
| | | GTCGGTGC | | | | | | | |
| 3927 | L2_e4_ | GTTTAAGAGCTAGAA | 6445 | GTTTAAGAGCTAGA | 6603 | GACGAAAGTCTACG | Stem loop | 4 | 84 |
| | 43 | ATAGCAAGTTTAAAT | | AATAGCAAGTTTAA | | CGGCACCGAGTCGG | 2 | | |
| | | AAGGCTAGTCCGTTAT | | ATAAGGCTAGTCCG | | TGC | | | |
| | | CAGCGTAGACGAAAG | | TTATCAGCGTa | | | | | |
| | | TCTACGCGGCACCGA | | | | | | | |
| | | GTCGGTGC | | | | | | | |
| 3928 | L2_e4_ | GTTTAAGAGCTAGAA | 6446 | GTTTAAGAGCTAGA | 6604 | TTCGAAAGAAGACG | Stem loop | 4 | 84 |
| | 44 | ATAGCAAGTTTAAAT | | AATAGCAAGTTTAA | | CGGCACCGAGTCGG | 2 | | |
| | | AAGGCTAGTCCGTTAT | | ATAAGGCTAGTCCG | | TGC | | | |
| | | CAGCGTCTTCGAAAG | | TTATCAGCGTc | | | | | |
| | | AAGACGCGGCACCGA | | | | | | | |
| | | GTCGGTGC | | | | | | | |
| 3929 | L2_e4_ | GTTTAAGAGCTAGAA | 6447 | GTTTAAGAGCTAGA | 6605 | TGGGAAACCATACG | Stem loop | 4 | 84 |
| | 45 | ATAGCAAGTTTAAAT | | AATAGCAAGTTTAA | | CGGCACCGAGTCGG | 2 | | |
| | | AAGGCTAGTCCGTTAT | | ATAAGGCTAGTCCG | | TGC | | | |
| | | CAGCGTATGGGAAAC | | TTATCAGCGTa | | | | | |
| | | CATACGCGGCACCGA | | | | | | | |
| | | GTCGGTGC | | | | | | | |
| 3930 | L2_e4_ | GTTTAAGAGCTAGAA | 6448 | GTTTAAGAGCTAGA | 6606 | TGGGAAACCACACG | Stem loop | 4 | 84 |
| | 46 | ATAGCAAGTTTAAAT | | AATAGCAAGTTTAA | | CGGCACCGAGTCGG | 2 | | |
| | | AAGGCTAGTCCGTTAT | | ATAAGGCTAGTCCG | | TGC | | | |
| | | CAGCGTGTGGGAAAC | | TTATCAGCGTg | | | | | |
| | | CACACGCGGCACCGA | | | | | | | |
| | | GTCGGTGC | | | | | | | |
| 3931 | L2_e4_ | GTTTAAGAGCTAGAA | 6449 | GTTTAAGAGCTAGA | 6590 | GGCGAAAGCCGACG | Stem loop | 4 | 84 |
| | 47 | ATAGCAAGTTTAAAT | | AATAGCAAGTTTAA | | CGGCACCGAGTCGG | 2 | | |
| | | AAGGCTAGTCCGTTAT | | ATAAGGCTAGTCCG | | TGC | | | |
| | | CAGCGTTGGCGAAAG | | TTATCAGCGTt | | | | | |
| | | CCGACGCGGCACCGA | | | | | | | |
| | | GTCGGTGC | | | | | | | |
| 3932 | L2_e4_ | GTTTAAGAGCTAGAA | 6450 | GTTTAAGAGCTAGA | 6607 | AGGGAAACCTTACG | Stem loop | 4 | 84 |
| | 48 | ATAGCAAGTTTAAAT | | AATAGCAAGTTTAA | | CGGCACCGAGTCGG | 2 | | |
| | | AAGGCTAGTCCGTTAT | | ATAAGGCTAGTCCG | | TGC | | | |
| | | CAGCGTAAGGGAAAC | | TTATCAGCGTa | | | | | |
| | | CTTACGCGGCACCGA | | | | | | | |
| | | GTCGGTGC | | | | | | | |
| 3933 | L2_e4_ | GTTTAAGAGCTAGAA | 6451 | GTTTAAGAGCTAGA | 6608 | AGCGAAAGCTGACG | Stem loop | 4 | 84 |
| | 49 | ATAGCAAGTTTAAAT | | AATAGCAAGTTTAA | | CGGCACCGAGTCGG | 2 | | |
| | | AAGGCTAGTCCGTTAT | | ATAAGGCTAGTCCG | | TGC | | | |
| | | CAGCGTCAGCGAAAG | | TTATCAGCGTc | | | | | |
| | | CTGACGCGGCACCGA | | | | | | | |
| | | GTCGGTGC | | | | | | | |
| 3934 | L2_e4_ | GTTTAAGAGCTAGAA | 6452 | GTTTAAGAGCTAGA | 6609 | CACGAAAGTGTACG | Stem loop | 4 | 84 |
| | 50 | ATAGCAAGTTTAAAT | | AATAGCAAGTTTAA | | CGGCACCGAGTCGG | 2 | | |
| | | AAGGCTAGTCCGTTAT | | ATAAGGCTAGTCCG | | TGC | | | |
| | | CAGCGTACACGAAAG | | TTATCAGCGTa | | | | | |
| | | TGTACGCGGCACCGA | | | | | | | |
| | | GTCGGTGC | | | | | | | |
| 3935 | L2_e4_ | GTTTAAGAGCTAGAA | 6453 | GTTTAAGAGCTAGA | 6610 | GTCGAAAGGCGACG | Stem loop | 4 | 84 |
| | 51 | ATAGCAAGTTTAAAT | | AATAGCAAGTTTAA | | CGGCACCGAGTCGG | 2 | | |
| | | AAGGCTAGTCCGTTAT | | ATAAGGCTAGTCCG | | TGC | | | |
| | | CAGCGTCGTCGAAAG | | TTATCAGCGTc | | | | | |
| | | GCGACGCGGCACCGA | | | | | | | |
| | | GTCGGTGC | | | | | | | |
| 3936 | L2_e4_ | GTTTAAGAGCTAGAA | 6454 | GTTTAAGAGCTAGA | 6611 | GCCGAAAGGCAACG | Stem loop | 4 | 84 |
| | 52 | ATAGCAAGTTTAAAT | | AATAGCAAGTTTAA | | CGGCACCGAGTCGG | 2 | | |
| | | AAGGCTAGTCCGTTAT | | ATAAGGCTAGTCCG | | TGC | | | |
| | | CAGCGTTGCCGAAAG | | TTATCAGCGTt | | | | | |
| | | GCAACGCGGCACCGA | | | | | | | |
| | | GTCGGTGC | | | | | | | |
| 3937 | L2_e4_ | GTTTAAGAGCTAGAA | 6455 | GTTTAAGAGCTAGA | 6612 | GGAGAAATCCAACG | Stem loop | 4 | 84 |
| | 53 | ATAGCAAGTTTAAAT | | AATAGCAAGTTTAA | | CGGCACCGAGTCGG | 2 | | |
| | | AAGGCTAGTCCGTTAT | | ATAAGGCTAGTCCG | | TGC | | | |
| | | CAGCGTTGGAGAAAT | | TTATCAGCGTt | | | | | |
| | | CCAACGCGGCACCGA | | | | | | | |
| | | GTCGGTGC | | | | | | | |
| 3938 | L2_e4_ | GTTTAAGAGCTAGAA | 6456 | GTTTAAGAGCTAGA | 6613 | CTCGAAAGAGTACG | Stem loop | 4 | 84 |
| | 54 | ATAGCAAGTTTAAAT | | AATAGCAAGTTTAA | | CGGCACCGAGTCGG | 2 | | |
| | | AAGGCTAGTCCGTTAT | | ATAAGGCTAGTCCG | | TGC | | | |
| | | CAGCGTACTCGAAAG | | TTATCAGCGTa | | | | | |
| | | AGTACGCGGCACCGA | | | | | | | |
| | | GTCGGTGC | | | | | | | |
| 3939 | L2_e4_ | GTTTAAGAGCTAGAA | 6457 | GTTTAAGAGCTAGA | 6614 | CGTGAAAACGTACG | Stem loop | 4 | 84 |
| | 55 | ATAGCAAGTTTAAAT | | AATAGCAAGTTTAA | | CGGCACCGAGTCGG | 2 | | |
| | | AAGGCTAGTCCGTTAT | | ATAAGGCTAGTCCG | | TGC | | | |
| | | CAGCGTACGTGAAAA | | TTATCAGCGTa | | | | | |
| | | CGTACGCGGCACCGA | | | | | | | |
| | | GTCGGTGC | | | | | | | |
| 3940 | L2_e4_ | GTTTAAGAGCTAGAA | 6458 | GTTTAAGAGCTAGA | 6615 | ACGGAAACGTTACG | Stem loop | 4 | 84 |
| | 56 | ATAGCAAGTTTAAAT | | AATAGCAAGTTTAA | | CGGCACCGAGTCGG | 2 | | |
| | | AAGGCTAGTCCGTTAT | | ATAAGGCTAGTCCG | | TGC | | | |
| | | CAGCGTAACGGAAAC | | TTATCAGCGTa | | | | | |
| | | GTTACGCGGCACCGA | | | | | | | |
| | | GTCGGTGC | | | | | | | |
| 3941 | L2_e4_ | GTTTAAGAGCTAGAA | 6459 | GTTTAAGAGCTAGA | 6616 | ATCGAAAGGTGACG | Stem loop | 4 | 84 |
| | 57 | ATAGCAAGTTTAAAT | | AATAGCAAGTTTAA | | CGGCACCGAGTCGG | 2 | | |
| | | AAGGCTAGTCCGTTAT | | ATAAGGCTAGTCCG | | TGC | | | |
| | | CAGCGTCATCGAAAG | | TTATCAGCGTc | | | | | |
| | | GTGACGCGGCACCGA | | | | | | | |
| | | GTCGGTGC | | | | | | | |
| 3942 | L2_e4_ | GTTTAAGAGCTAGAA | 6460 | GTTTAAGAGCTAGA | 6617 | TGGGAAACCAGACG | Stem loop | 4 | 84 |
| | 58 | ATAGCAAGTTTAAAT | | AATAGCAAGTTTAA | | CGGCACCGAGTCGG | 2 | | |
| | | AAGGCTAGTCCGTTAT | | ATAAGGCTAGTCCG | | TGC | | | |
| | | CAGCGTTTGGGAAAC | | TTATCAGCGTt | | | | | |
| | | CAGACGCGGCACCGA | | | | | | | |
| | | GTCGGTGC | | | | | | | |
| 3943 | L2_e4_ | GTTTAAGAGCTAGAA | 6461 | GTTTAAGAGCTAGA | 6618 | AAGGAAACTTGACG | Stem loop | 4 | 84 |
| | 59 | ATAGCAAGTTTAAAT | | AATAGCAAGTTTAA | | CGGCACCGAGTCGG | 2 | | |
| | | AAGGCTAGTCCGTTAT | | ATAAGGCTAGTCCG | | TGC | | | |
| | | CAGCGTCAAGGAAAC | | TTATCAGCGTc | | | | | |
| | | TTGACGCGGCACCGA | | | | | | | |
| | | GTCGGTGC | | | | | | | |
| 3944 | L2_e4_ | GTTTAAGAGCTAGAA | 6462 | GTTTAAGAGCTAGA | 6619 | GGTGAAAGCCAACG | Stem loop | 4 | 84 |
| | 60 | ATAGCAAGTTTAAAT | | AATAGCAAGTTTAA | | CGGCACCGAGTCGG | 2 | | |
| | | AAGGCTAGTCCGTTAT | | ATAAGGCTAGTCCG | | TGC | | | |
| | | CAGCGTTGGTGAAAG | | TTATCAGCGTt | | | | | |
| | | CCAACGCGGCACCGA | | | | | | | |
| | | GTCGGTGC | | | | | | | |
| 3945 | L2_e4_ | GTTTAAGAGCTAGAA | 6463 | GTTTAAGAGCTAGA | 6620 | CGAGAAATCGGACG | Stem loop | 4 | 84 |
| | 61 | ATAGCAAGTTTAAAT | | AATAGCAAGTTTAA | | CGGCACCGAGTCGG | 2 | | |
| | | AAGGCTAGTCCGTTAT | | ATAAGGCTAGTCCG | | TGC | | | |
| | | CAGCGTTCGAGAAAT | | TTATCAGCGTt | | | | | |
| | | CGGACGCGGCACCGA | | | | | | | |
| | | GTCGGTGC | | | | | | | |
| 3946 | L2_e4_ | GTTTAAGAGCTAGAA | 6464 | GTTTAAGAGCTAGA | 6621 | GGTGAAAACCCACG | Stem loop | 4 | 84 |
| | 62 | ATAGCAAGTTTAAAT | | AATAGCAAGTTTAA | | CGGCACCGAGTCGG | 2 | | |
| | | AAGGCTAGTCCGTTAT | | ATAAGGCTAGTCCG | | TGC | | | |
| | | CAGCGTGGGTGAAAA | | TTATCAGCGTg | | | | | |
| | | CCCACGCGGCACCGA | | | | | | | |
| | | GTCGGTGC | | | | | | | |
| 3947 | L2_e4_ | GTTTAAGAGCTAGAA | 6465 | GTTTAAGAGCTAGA | 6622 | ATCGAAAGATCACG | Stem loop | 4 | 84 |
| | 63 | ATAGCAAGTTTAAAT | | AATAGCAAGTTTAA | | CGGCACCGAGTCGG | 2 | | |
| | | AAGGCTAGTCCGTTAT | | ATAAGGCTAGTCCG | | TGC | | | |
| | | CAGCGTGATCGAAAG | | TTATCAGCGTg | | | | | |
| | | ATCACGCGGCACCGA | | | | | | | |
| | | GTCGGTGC | | | | | | | |
| 3948 | L2_e4_ | GTTTAAGAGCTAGAA | 6466 | GTTTAAGAGCTAGA | 6623 | GCGGAAACGCAACG | Stem loop | 4 | 84 |
| | 64 | ATAGCAAGTTTAAAT | | AATAGCAAGTTTAA | | CGGCACCGAGTCGG | 2 | | |
| | | AAGGCTAGTCCGTTAT | | ATAAGGCTAGTCCG | | TGC | | | |
| | | CAGCGTTGCGGAAAC | | TTATCAGCGTt | | | | | |
| | | GCAACGCGGCACCGA | | | | | | | |
| | | GTCGGTGC | | | | | | | |
| 3949 | L2_e4_ | GTTTAAGAGCTAGAA | 6467 | GTTTAAGAGCTAGA | 6624 | TCGGAAACGAGACG | Stem loop | 4 | 84 |
| | 65 | ATAGCAAGTTTAAAT | | AATAGCAAGTTTAA | | CGGCACCGAGTCGG | 2 | | |
| | | AAGGCTAGTCCGTTAT | | ATAAGGCTAGTCCG | | TGC | | | |
| | | CAGCGTTTCGGAAAC | | TTATCAGCGTt | | | | | |
| | | GAGACGCGGCACCGA | | | | | | | |
| | | GTCGGTGC | | | | | | | |
| 3950 | L2_e4_ | GTTTAAGAGCTAGAA | 6468 | GTTTAAGAGCTAGA | 6625 | TCAGAAATGGCACG | Stem loop | 4 | 84 |
| | 66 | ATAGCAAGTTTAAAT | | AATAGCAAGTTTAA | | CGGCACCGAGTCGG | 2 | | |
| | | AAGGCTAGTCCGTTAT | | ATAAGGCTAGTCCG | | TGC | | | |
| | | CAGCGTGTCAGAAAT | | TTATCAGCGTg | | | | | |
| | | GGCACGCGGCACCGA | | | | | | | |
| | | GTCGGTGC | | | | | | | |
| 3951 | L2_e4_ | GTTTAAGAGCTAGAA | 6469 | GTTTAAGAGCTAGA | 6626 | GCCGAAAGGTAACG | Stem loop | 4 | 84 |
| | 67 | ATAGCAAGTTTAAAT | | AATAGCAAGTTTAA | | CGGCACCGAGTCGG | 2 | | |
| | | AAGGCTAGTCCGTTAT | | ATAAGGCTAGTCCG | | TGC | | | |
| | | CAGCGTTGCCGAAAG | | TTATCAGCGTt | | | | | |
| | | GTAACGCGGCACCGA | | | | | | | |
| | | GTCGGTGC | | | | | | | |
| 3952 | L2_e4_ | GTTTAAGAGCTAGAA | 6470 | GTTTAAGAGCTAGA | 6627 | GAGGAAACTCGACG | Stem loop | 4 | 84 |
| | 68 | ATAGCAAGTTTAAAT | | AATAGCAAGTTTAA | | CGGCACCGAGTCGG | 2 | | |
| | | AAGGCTAGTCCGTTAT | | ATAAGGCTAGTCCG | | TGC | | | |
| | | CAGCGTCGAGGAAAC | | TTATCAGCGTc | | | | | |
| | | TCGACGCGGCACCGA | | | | | | | |
| | | GTCGGTGC | | | | | | | |
| 3953 | L2_e4_ | GTTTAAGAGCTAGAA | 6471 | GTTTAAGAGCTAGA | 6628 | GCAGAAATGCGACG | Stem loop | 4 | 84 |
| | 69 | ATAGCAAGTTTAAAT | | AATAGCAAGTTTAA | | CGGCACCGAGTCGG | 2 | | |
| | | AAGGCTAGTCCGTTAT | | ATAAGGCTAGTCCG | | TGC | | | |
| | | CAGCGTCGCAGAAAT | | TTATCAGCGTc | | | | | |
| | | GCGACGCGGCACCGA | | | | | | | |
| | | GTCGGTGC | | | | | | | |
| 3954 | L2_e4_ | GTTTAAGAGCTAGAA | 6472 | GTTTAAGAGCTAGA | 6629 | CTTGAAAAAGGACG | Stem loop | 4 | 84 |
| | 70 | ATAGCAAGTTTAAAT | | AATAGCAAGTTTAA | | CGGCACCGAGTCGG | 2 | | |
| | | AAGGCTAGTCCGTTAT | | ATAAGGCTAGTCCG | | TGC | | | |
| | | CAGCGTCCTTGAAAA | | TTATCAGCGTc | | | | | |
| | | AGGACGCGGCACCGA | | | | | | | |
| | | GTCGGTGC | | | | | | | |
| 3955 | L2_e4_ | GTTTAAGAGCTAGAA | 6473 | GTTTAAGAGCTAGA | 6630 | GATGAAAATCGACG | Stem loop | 4 | 84 |
| | 71 | ATAGCAAGTTTAAAT | | AATAGCAAGTTTAA | | CGGCACCGAGTCGG | 2 | | |
| | | AAGGCTAGTCCGTTAT | | ATAAGGCTAGTCCG | | TGC | | | |
| | | CAGCGTCGATGAAAA | | TTATCAGCGTc | | | | | |
| | | TCGACGCGGCACCGA | | | | | | | |
| | | GTCGGTGC | | | | | | | |
| 3956 | L2_e4_ | GTTTAAGAGCTAGAA | 6474 | GTTTAAGAGCTAGA | 6593 | GTCGAAAGACGACG | Stem loop | 4 | 84 |
| | 72 | ATAGCAAGTTTAAAT | | AATAGCAAGTTTAA | | CGGCACCGAGTCGG | 2 | | |
| | | AAGGCTAGTCCGTTAT | | ATAAGGCTAGTCCG | | TGC | | | |
| | | CAGCGTCGTCGAAAG | | TTATCAGCGTc | | | | | |
| | | ACGACGCGGCACCGA | | | | | | | |
| | | GTCGGTGC | | | | | | | |
| 3957 | L2_e4_ | GTTTAAGAGCTAGAA | 6475 | GTTTAAGAGCTAGA | 6631 | ACTGAAAAGTGACG | Stem loop | 4 | 84 |
| | 73 | ATAGCAAGTTTAAAT | | AATAGCAAGTTTAA | | CGGCACCGAGTCGG | 2 | | |
| | | AAGGCTAGTCCGTTAT | | ATAAGGCTAGTCCG | | TGC | | | |
| | | CAGCGTCACTGAAAA | | TTATCAGCGTc | | | | | |
| | | GTGACGCGGCACCGA | | | | | | | |
| | | GTCGGTGC | | | | | | | |
| 3958 | L2_e4_ | GTTTAAGAGCTAGAA | 6476 | GTTTAAGAGCTAGA | 6632 | CCAGAAATGGTACG | Stem loop | 4 | 84 |
| | 74 | ATAGCAAGTTTAAAT | | AATAGCAAGTTTAA | | CGGCACCGAGTCGG | 2 | | |
| | | AAGGCTAGTCCGTTAT | | ATAAGGCTAGTCCG | | TGC | | | |
| | | CAGCGTACCAGAAAT | | TTATCAGCGTa | | | | | |
| | | GGTACGCGGCACCGA | | | | | | | |
| | | GTCGGTGC | | | | | | | |
| 3959 | L2_e4_ | GTTTAAGAGCTAGAA | 6477 | GTTTAAGAGCTAGA | 6633 | TCCGAAAGGAGACG | Stem loop | 4 | 84 |
| | 75 | ATAGCAAGTTTAAAT | | AATAGCAAGTTTAA | | CGGCACCGAGTCGG | 2 | | |
| | | AAGGCTAGTCCGTTAT | | ATAAGGCTAGTCCG | | TGC | | | |
| | | CAGCGTCTCCGAAAG | | TTATCAGCGTc | | | | | |
| | | GAGACGCGGCACCGA | | | | | | | |
| | | GTCGGTGC | | | | | | | |
| 3960 | L2_e5_ | GTTTAAGAGCTAGAA | 6478 | GTTTAAGAGCTAGA | 6634 | GGCGAAAGCCTCAC | Stem loop | 5 | 86 |
| | 1 | ATAGCAAGTTTAAAT | | AATAGCAAGTTTAA | | GCGGCACCGAGTCG | 2 | | |
| | | AAGGCTAGTCCGTTAT | | ATAAGGCTAGTCCG | | GTGC | | | |
| | | CAGCGTGGGGCGAAA | | TTATCAGCGTgg | | | | | |
| | | GCCTCACGCGGCACC | | | | | | | |
| | | GAGTCGGTGC | | | | | | | |
| 3961 | L2_e5_ | GTTTAAGAGCTAGAA | 6479 | GTTTAAGAGCTAGA | 6635 | CAGGAAACTGAGAC | Stem loop | 5 | 86 |
| | 2 | ATAGCAAGTTTAAAT | | AATAGCAAGTTTAA | | GCGGCACCGAGTCG | 2 | | |
| | | AAGGCTAGTCCGTTAT | | ATAAGGCTAGTCCG | | GTGC | | | |
| | | CAGCGTCTCAGGAAA | | TTATCAGCGTct | | | | | |
| | | CTGAGACGCGGCACC | | | | | | | |
| | | GAGTCGGTGC | | | | | | | |
| 3962 | L2_e5_ | GTTTAAGAGCTAGAA | 6480 | GTTTAAGAGCTAGA | 6636 | GCCGAAAGGCCGAC | Stem loop | 5 | 86 |
| | 3 | ATAGCAAGTTTAAAT | | AATAGCAAGTTTAA | | GCGGCACCGAGTCG | 2 | | |
| | | AAGGCTAGTCCGTTAT | | ATAAGGCTAGTCCG | | GTGC | | | |
| | | CAGCGTCGGCCGAAA | | TTATCAGCGTcg | | | | | |
| | | GGCCGACGCGGCACC | | | | | | | |
| | | GAGTCGGTGC | | | | | | | |
| 3963 | L2_e5_ | GTTTAAGAGCTAGAA | 6481 | GTTTAAGAGCTAGA | 6637 | GATGAAAGTCGCAC | Stem loop | 5 | 86 |
| | 4 | ATAGCAAGTTTAAAT | | AATAGCAAGTTTAA | | GCGGCACCGAGTCG | 2 | | |
| | | AAGGCTAGTCCGTTAT | | ATAAGGCTAGTCCG | | GTGC | | | |
| | | CAGCGTGCGATGAAA | | TTATCAGCGTgc | | | | | |
| | | GTCGCACGCGGCACC | | | | | | | |
| | | GAGTCGGTGC | | | | | | | |
| 3964 | L2_e5_ | GTTTAAGAGCTAGAA | 6482 | GTTTAAGAGCTAGA | 6638 | TGGGAAACCACTAC | Stem loop | 5 | 86 |
| | 5 | ATAGCAAGTTTAAAT | | AATAGCAAGTTTAA | | GCGGCACCGAGTCG | 2 | | |
| | | AAGGCTAGTCCGTTAT | | ATAAGGCTAGTCCG | | GTGC | | | |
| | | CAGCGTAGTGGGAAA | | TTATCAGCGTag | | | | | |
| | | CCACTACGCGGCACC | | | | | | | |
| | | GAGTCGGTGC | | | | | | | |
| 3965 | L2_e5_ | GTTTAAGAGCTAGAA | 6483 | GTTTAAGAGCTAGA | 6639 | GCCGAAAGGCGAAC | Stem loop | 5 | 86 |
| | 6 | ATAGCAAGTTTAAAT | | AATAGCAAGTTTAA | | GCGGCACCGAGTCG | 2 | | |
| | | AAGGCTAGTCCGTTAT | | ATAAGGCTAGTCCG | | GTGC | | | |
| | | CAGCGTTCGCCGAAA | | TTATCAGCGTtc | | | | | |
| | | GGCGAACGCGGCACC | | | | | | | |
| | | GAGTCGGTGC | | | | | | | |
| 3966 | L2_e5_ | GTTTAAGAGCTAGAA | 6484 | GTTTAAGAGCTAGA | 6640 | CGAGAAATTGGCAC | Stem loop | 5 | 86 |
| | 7 | ATAGCAAGTTTAAAT | | AATAGCAAGTTTAA | | GCGGCACCGAGTCG | 2 | | |
| | | AAGGCTAGTCCGTTAT | | ATAAGGCTAGTCCG | | GTGC | | | |
| | | CAGCGTGCCGAGAAA | | TTATCAGCGTgc | | | | | |
| | | TTGGCACGCGGCACC | | | | | | | |
| | | GAGTCGGTGC | | | | | | | |
| 3967 | L2_e5_ | GTTTAAGAGCTAGAA | 6485 | GTTTAAGAGCTAGA | 6641 | CTCGAAAGAGCTAC | Stem loop | 5 | 86 |
| | 8 | ATAGCAAGTTTAAAT | | AATAGCAAGTTTAA | | GCGGCACCGAGTCG | 2 | | |
| | | AAGGCTAGTCCGTTAT | | ATAAGGCTAGTCCG | | GTGC | | | |
| | | CAGCGTAGCTCGAAA | | TTATCAGCGTag | | | | | |
| | | GAGCTACGCGGCACC | | | | | | | |
| | | GAGTCGGTGC | | | | | | | |
| 3968 | L2_e5_ | GTTTAAGAGCTAGAA | 6486 | GTTTAAGAGCTAGA | 6642 | GGAGAAATCCTGAC | Stem loop | 5 | 86 |
| | 9 | ATAGCAAGTTTAAAT | | AATAGCAAGTTTAA | | GCGGCACCGAGTCG | 2 | | |
| | | AAGGCTAGTCCGTTAT | | ATAAGGCTAGTCCG | | GTGC | | | |
| | | CAGCGTCAGGAGAAA | | TTATCAGCGTca | | | | | |
| | | TCCTGACGCGGCACC | | | | | | | |
| | | GAGTCGGTGC | | | | | | | |
| 3969 | L2_e5_ | GTTTAAGAGCTAGAA | 6487 | GTTTAAGAGCTAGA | 6643 | GGGGAAACCCGTAC | Stem loop | 5 | 86 |
| | 10 | ATAGCAAGTTTAAAT | | AATAGCAAGTTTAA | | GCGGCACCGAGTCG | 2 | | |
| | | AAGGCTAGTCCGTTAT | | ATAAGGCTAGTCCG | | GTGC | | | |
| | | CAGCGTACGGGGAAA | | TTATCAGCGTac | | | | | |
| | | CCCGTACGCGGCACC | | | | | | | |
| | | GAGTCGGTGC | | | | | | | |
| 3970 | L2_e5_ | GTTTAAGAGCTAGAA | 6488 | GTTTAAGAGCTAGA | 6644 | GGTGAAAGCCTGAC | Stem loop | 5 | 86 |
| | 11 | ATAGCAAGTTTAAAT | | AATAGCAAGTTTAA | | GCGGCACCGAGTCG | 2 | | |
| | | AAGGCTAGTCCGTTAT | | ATAAGGCTAGTCCG | | GTGC | | | |
| | | CAGCGTCAGGTGAAA | | TTATCAGCGTca | | | | | |
| | | GCCTGACGCGGCACC | | | | | | | |
| | | GAGTCGGTGC | | | | | | | |
| 3971 | L2_e5_ | GTTTAAGAGCTAGAA | 6489 | GTTTAAGAGCTAGA | 6645 | CAGGAAACTGGAAC | Stem loop | 5 | 86 |
| | 12 | ATAGCAAGTTTAAAT | | AATAGCAAGTTTAA | | GCGGCACCGAGTCG | 2 | | |
| | | AAGGCTAGTCCGTTAT | | ATAAGGCTAGTCCG | | GTGC | | | |
| | | CAGCGTTCCAGGAAA | | TTATCAGCGTtc | | | | | |
| | | CTGGAACGCGGCACC | | | | | | | |
| | | GAGTCGGTGC | | | | | | | |
| 3972 | L2_e5_ | GTTTAAGAGCTAGAA | 6490 | GTTTAAGAGCTAGA | 6646 | GAGGAAACTCTCAC | Stem loop | 5 | 86 |
| | 13 | ATAGCAAGTTTAAAT | | AATAGCAAGTTTAA | | GCGGCACCGAGTCG | 2 | | |
| | | AAGGCTAGTCCGTTAT | | ATAAGGCTAGTCCG | | GTGC | | | |
| | | CAGCGTGAGAGGAAA | | TTATCAGCGTga | | | | | |
| | | CTCTCACGCGGCACCG | | | | | | | |
| | | AGTCGGTGC | | | | | | | |
| 3973 | L2_e5_ | GTTTAAGAGCTAGAA | 6491 | GTTTAAGAGCTAGA | 6647 | CTCGAAAGAGTGAC | Stem loop | 5 | 86 |
| | 14 | ATAGCAAGTTTAAAT | | AATAGCAAGTTTAA | | GCGGCACCGAGTCG | 2 | | |
| | | AAGGCTAGTCCGTTAT | | ATAAGGCTAGTCCG | | GTGC | | | |
| | | CAGCGTCACTCGAAA | | TTATCAGCGTca | | | | | |
| | | GAGTGACGCGGCACC | | | | | | | |
| | | GAGTCGGTGC | | | | | | | |
| 3974 | L2_e5_ | GTTTAAGAGCTAGAA | 6492 | GTTTAAGAGCTAGA | 6648 | TGCGAAAGCAGCAC | Stem loop | 5 | 86 |
| | 15 | ATAGCAAGTTTAAAT | | AATAGCAAGTTTAA | | GCGGCACCGAGTCG | 2 | | |
| | | AAGGCTAGTCCGTTAT | | ATAAGGCTAGTCCG | | GTGC | | | |
| | | CAGCGTGTTGCGAAA | | TTATCAGCGTgt | | | | | |
| | | GCAGCACGCGGCACC | | | | | | | |
| | | GAGTCGGTGC | | | | | | | |
| 3975 | L2_e5_ | GTTTAAGAGCTAGAA | 6493 | GTTTAAGAGCTAGA | 6649 | AGGGAAACCTGCAC | Stem loop | 5 | 86 |
| | 16 | ATAGCAAGTTTAAAT | | AATAGCAAGTTTAA | | GCGGCACCGAGTCG | 2 | | |
| | | AAGGCTAGTCCGTTAT | | ATAAGGCTAGTCCG | | GTGC | | | |
| | | CAGCGTGTAGGGAAA | | TTATCAGCGTgt | | | | | |
| | | CCTGCACGCGGCACC | | | | | | | |
| | | GAGTCGGTGC | | | | | | | |
| 3976 | L2_e5_ | GTTTAAGAGCTAGAA | 6494 | GTTTAAGAGCTAGA | 6650 | CCTGAAAGGGACAC | Stem loop | 5 | 86 |
| | 17 | ATAGCAAGTTTAAAT | | AATAGCAAGTTTAA | | GCGGCACCGAGTCG | 2 | | |
| | | AAGGCTAGTCCGTTAT | | ATAAGGCTAGTCCG | | GTGC | | | |
| | | CAGCGTGTCCTGAAA | | TTATCAGCGTgt | | | | | |
| | | GGGACACGCGGCACC | | | | | | | |
| | | GAGTCGGTGC | | | | | | | |
| 3977 | L2_e5_ | GTTTAAGAGCTAGAA | 6495 | GTTTAAGAGCTAGA | 6651 | CCCGAAAGGGTTAC | Stem loop | 5 | 86 |
| | 18 | ATAGCAAGTTTAAAT | | AATAGCAAGTTTAA | | GCGGCACCGAGTCG | 2 | | |
| | | AAGGCTAGTCCGTTAT | | ATAAGGCTAGTCCG | | GTGC | | | |
| | | CAGCGTAACCCGAAA | | TTATCAGCGTaa | | | | | |
| | | GGGTTACGCGGCACC | | | | | | | |
| | | GAGTCGGTGC | | | | | | | |
| 3978 | L2_e5_ | GTTTAAGAGCTAGAA | 6496 | GTTTAAGAGCTAGA | 6652 | CCGGAAACGGGTAC | Stem loop | 5 | 86 |
| | 19 | ATAGCAAGTTTAAAT | | AATAGCAAGTTTAA | | GCGGCACCGAGTCG | 2 | | |
| | | AAGGCTAGTCCGTTAT | | ATAAGGCTAGTCCG | | GTGC | | | |
| | | CAGCGTACCCGGAAA | | TTATCAGCGTac | | | | | |
| | | CGGGTACGCGGCACC | | | | | | | |
| | | GAGTCGGTGC | | | | | | | |
| 3979 | L2_e5_ | GTTTAAGAGCTAGAA | 6497 | GTTTAAGAGCTAGA | 6653 | GTTGAAAGACGCAC | Stem loop | 5 | 86 |
| | 20 | ATAGCAAGTTTAAAT | | AATAGCAAGTTTAA | | GCGGCACCGAGTCG | 2 | | |
| | | AAGGCTAGTCCGTTAT | | ATAAGGCTAGTCCG | | GTGC | | | |
| | | CAGCGTGCGTTGAAA | | TTATCAGCGTgc | | | | | |
| | | GACGCACGCGGCACC | | | | | | | |
| | | GAGTCGGTGC | | | | | | | |
| 3980 | L2_e5_ | GTTTAAGAGCTAGAA | 6498 | GTTTAAGAGCTAGA | 6654 | CGCGAAAGCGGCAC | Stem loop | 5 | 86 |
| | 21 | ATAGCAAGTTTAAAT | | AATAGCAAGTTTAA | | GCGGCACCGAGTCG | 2 | | |
| | | AAGGCTAGTCCGTTAT | | ATAAGGCTAGTCCG | | GTGC | | | |
| | | CAGCGTGCCGCGAAA | | TTATCAGCGTgc | | | | | |
| | | GCGGCACGCGGCACC | | | | | | | |
| | | GAGTCGGTGC | | | | | | | |
| 3981 | L2_e5_ | GTTTAAGAGCTAGAA | 6499 | GTTTAAGAGCTAGA | 6655 | GGGGAAATCCCAAC | Stem loop | 5 | 86 |
| | 22 | ATAGCAAGTTTAAAT | | AATAGCAAGTTTAA | | GCGGCACCGAGTCG | 2 | | |
| | | AAGGCTAGTCCGTTAT | | ATAAGGCTAGTCCG | | GTGC | | | |
| | | CAGCGTTGGGGGAAA | | TTATCAGCGTtg | | | | | |
| | | TCCCAACGCGGCACC | | | | | | | |
| | | GAGTCGGTGC | | | | | | | |
| 3982 | L2_e5_ | GTTTAAGAGCTAGAA | 6500 | GTTTAAGAGCTAGA | 6656 | AGAGAAATCTGCAC | Stem loop | 5 | 86 |
| | 23 | ATAGCAAGTTTAAAT | | AATAGCAAGTTTAA | | GCGGCACCGAGTCG | 2 | | |
| | | AAGGCTAGTCCGTTAT | | ATAAGGCTAGTCCG | | GTGC | | | |
| | | CAGCGTGCAGAGAAA | | TTATCAGCGTgc | | | | | |
| | | TCTGCACGCGGCACC | | | | | | | |
| | | GAGTCGGTGC | | | | | | | |
| 3983 | L2_e5_ | GTTTAAGAGCTAGAA | 6501 | GTTTAAGAGCTAGA | 6657 | CGTGAAAACGACAC | Stem loop | 5 | 86 |
| | 24 | ATAGCAAGTTTAAAT | | AATAGCAAGTTTAA | | GCGGCACCGAGTCG | 2 | | |
| | | AAGGCTAGTCCGTTAT | | ATAAGGCTAGTCCG | | GTGC | | | |
| | | CAGCGTGTCGTGAAA | | TTATCAGCGTgt | | | | | |
| | | ACGACACGCGGCACC | | | | | | | |
| | | GAGTCGGTGC | | | | | | | |
| 3984 | L2_e5_ | GTTTAAGAGCTAGAA | 6502 | GTTTAAGAGCTAGA | 6658 | TACGAAAGTACGAC | Stem loop | 5 | 86 |
| | 25 | ATAGCAAGTTTAAAT | | AATAGCAAGTTTAA | | GCGGCACCGAGTCG | 2 | | |
| | | AAGGCTAGTCCGTTAT | | ATAAGGCTAGTCCG | | GTGC | | | |
| | | CAGCGTCGTACGAAA | | TTATCAGCGTcg | | | | | |
| | | GTACGACGCGGCACC | | | | | | | |
| | | GAGTCGGTGC | | | | | | | |
| 3985 | L2_e5_ | GTTTAAGAGCTAGAA | 6503 | GTTTAAGAGCTAGA | 6659 | CGCGAAAGCGTGAC | Stem loop | 5 | 86 |
| | 26 | ATAGCAAGTTTAAAT | | AATAGCAAGTTTAA | | GCGGCACCGAGTCG | 2 | | |
| | | AAGGCTAGTCCGTTAT | | ATAAGGCTAGTCCG | | GTGC | | | |
| | | CAGCGTTACGCGAAA | | TTATCAGCGTta | | | | | |
| | | GCGTGACGCGGCACC | | | | | | | |
| | | GAGTCGGTGC | | | | | | | |
| 3986 | L2_e5_ | GTTTAAGAGCTAGAA | 6504 | GTTTAAGAGCTAGA | 6660 | GCGGAAACGTTGAC | Stem loop | 5 | 86 |
| | 27 | ATAGCAAGTTTAAAT | | AATAGCAAGTTTAA | | GCGGCACCGAGTCG | 2 | | |
| | | AAGGCTAGTCCGTTAT | | ATAAGGCTAGTCCG | | GTGC | | | |
| | | CAGCGTCAGCGGAAA | | TTATCAGCGTca | | | | | |
| | | CGTTGACGCGGCACC | | | | | | | |
| | | GAGTCGGTGC | | | | | | | |
| 3987 | L2_e5_ | GTTTAAGAGCTAGAA | 6505 | GTTTAAGAGCTAGA | 6661 | GACGAAAGTCAGAC | Stem loop | 5 | 86 |
| | 28 | ATAGCAAGTTTAAAT | | AATAGCAAGTTTAA | | GCGGCACCGAGTCG | 2 | | |
| | | AAGGCTAGTCCGTTAT | | ATAAGGCTAGTCCG | | GTGC | | | |
| | | CAGCGTCTGACGAAA | | TTATCAGCGTct | | | | | |
| | | GTCAGACGCGGCACC | | | | | | | |
| | | GAGTCGGTGC | | | | | | | |
| 3988 | L2_e5_ | GTTTAAGAGCTAGAA | 6506 | GTTTAAGAGCTAGA | 6662 | CGCGAAAGCGAGAC | Stem loop | 5 | 86 |
| | 29 | ATAGCAAGTTTAAAT | | AATAGCAAGTTTAA | | GCGGCACCGAGTCG | 2 | | |
| | | AAGGCTAGTCCGTTAT | | ATAAGGCTAGTCCG | | GTGC | | | |
| | | CAGCGTCTCGCGAAA | | TTATCAGCGTct | | | | | |
| | | GCGAGACGCGGCACC | | | | | | | |
| | | GAGTCGGTGC | | | | | | | |
| 3989 | L2_e5_ | GTTTAAGAGCTAGAA | 6507 | GTTTAAGAGCTAGA | 6663 | GGCGAAAGCCTAAC | Stem loop | 5 | 86 |
| | 30 | ATAGCAAGTTTAAAT | | AATAGCAAGTTTAA | | GCGGCACCGAGTCG | 2 | | |
| | | AAGGCTAGTCCGTTAT | | ATAAGGCTAGTCCG | | GTGC | | | |
| | | CAGCGTTGGGCGAAA | | TTATCAGCGTtg | | | | | |
| | | GCCTAACGCGGCACC | | | | | | | |
| | | GAGTCGGTGC | | | | | | | |
| 3990 | L2_e5_ | GTTTAAGAGCTAGAA | 6508 | GTTTAAGAGCTAGA | 6664 | AGGGAAACCTGGAC | Stem loop | 5 | 86 |
| | 31 | ATAGCAAGTTTAAAT | | AATAGCAAGTTTAA | | GCGGCACCGAGTCG | 2 | | |
| | | AAGGCTAGTCCGTTAT | | ATAAGGCTAGTCCG | | GTGC | | | |
| | | CAGCGTCCAGGGAAA | | TTATCAGCGTcc | | | | | |
| | | CCTGGACGCGGCACC | | | | | | | |
| | | GAGTCGGTGC | | | | | | | |
| 3991 | L2_e5_ | GTTTAAGAGCTAGAA | 6509 | GTTTAAGAGCTAGA | 6665 | CCTGAAAGGGGTAC | Stem loop | 5 | 86 |
| | 32 | ATAGCAAGTTTAAAT | | AATAGCAAGTTTAA | | GCGGCACCGAGTCG | 2 | | |
| | | AAGGCTAGTCCGTTAT | | ATAAGGCTAGTCCG | | GTGC | | | |
| | | CAGCGTACCCTGAAA | | TTATCAGCGTac | | | | | |
| | | GGGGTACGCGGCACC | | | | | | | |
| | | GAGTCGGTGC | | | | | | | |
| 3992 | L2_e5_ | GTTTAAGAGCTAGAA | 6510 | GTTTAAGAGCTAGA | 6666 | CCGGAAACGGGGAC | Stem loop | 5 | 86 |
| | 33 | ATAGCAAGTTTAAAT | | AATAGCAAGTTTAA | | GCGGCACCGAGTCG | 2 | | |
| | | AAGGCTAGTCCGTTAT | | ATAAGGCTAGTCCG | | GTGC | | | |
| | | CAGCGTTCCCGGAAA | | TTATCAGCGTtc | | | | | |
| | | CGGGGACGCGGCACC | | | | | | | |
| | | GAGTCGGTGC | | | | | | | |
| 3993 | L2_e5_ | GTTTAAGAGCTAGAA | 6511 | GTTTAAGAGCTAGA | 6667 | ACGGAAACGTGTAC | Stem loop | 5 | 86 |
| | 34 | ATAGCAAGTTTAAAT | | AATAGCAAGTTTAA | | GCGGCACCGAGTCG | 2 | | |
| | | AAGGCTAGTCCGTTAT | | ATAAGGCTAGTCCG | | GTGC | | | |
| | | CAGCGTACACGGAAA | | TTATCAGCGTac | | | | | |
| | | CGTGTACGCGGCACC | | | | | | | |
| | | GAGTCGGTGC | | | | | | | |
| 3994 | L2_e5_ | GTTTAAGAGCTAGAA | 6512 | GTTTAAGAGCTAGA | 6668 | ACGGAAACGTGGAC | Stem loop | 5 | 86 |
| | 35 | ATAGCAAGTTTAAAT | | AATAGCAAGTTTAA | | GCGGCACCGAGTCG | 2 | | |
| | | AAGGCTAGTCCGTTAT | | ATAAGGCTAGTCCG | | GTGC | | | |
| | | CAGCGTCCACGGAAA | | TTATCAGCGTcc | | | | | |
| | | CGTGGACGCGGCACC | | | | | | | |
| | | GAGTCGGTGC | | | | | | | |
| 3995 | L2_e5_ | GTTTAAGAGCTAGAA | 6513 | GTTTAAGAGCTAGA | 6669 | CATGAAAGTGGCAC | Stem loop | 5 | 86 |
| | 36 | ATAGCAAGTTTAAAT | | AATAGCAAGTTTAA | | GCGGCACCGAGTCG | 2 | | |
| | | AAGGCTAGTCCGTTAT | | ATAAGGCTAGTCCG | | GTGC | | | |
| | | CAGCGTGCCATGAAA | | TTATCAGCGTgc | | | | | |
| | | GTGGCACGCGGCACC | | | | | | | |
| | | GAGTCGGTGC | | | | | | | |
| 3996 | L2_e5_ | GTTTAAGAGCTAGAA | 6514 | GTTTAAGAGCTAGA | 6670 | CTCGAAAGAGGTAC | Stem loop | 5 | 86 |
| | 37 | ATAGCAAGTTTAAAT | | AATAGCAAGTTTAA | | GCGGCACCGAGTCG | 2 | | |
| | | AAGGCTAGTCCGTTAT | | ATAAGGCTAGTCCG | | GTGC | | | |
| | | CAGCGTACCTCGAAA | | TTATCAGCGTac | | | | | |
| | | GAGGTACGCGGCACC | | | | | | | |
| | | GAGTCGGTGC | | | | | | | |
| 3997 | L2_e5_ | GTTTAAGAGCTAGAA | 6515 | GTTTAAGAGCTAGA | 6671 | CTCGAAAGAGGCAC | Stem loop | 5 | 86 |
| | 38 | ATAGCAAGTTTAAAT | | AATAGCAAGTTTAA | | GCGGCACCGAGTCG | 2 | | |
| | | AAGGCTAGTCCGTTAT | | ATAAGGCTAGTCCG | | GTGC | | | |
| | | CAGCGTGTCTCGAAA | | TTATCAGCGTgt | | | | | |
| | | GAGGCACGCGGCACC | | | | | | | |
| | | GAGTCGGTGC | | | | | | | |
| 3998 | L2_e5_ | GTTTAAGAGCTAGAA | 6516 | GTTTAAGAGCTAGA | 6672 | ACCGAAAGGTCGAC | Stem loop | 5 | 86 |
| | 39 | ATAGCAAGTTTAAAT | | AATAGCAAGTTTAA | | GCGGCACCGAGTCG | 2 | | |
| | | AAGGCTAGTCCGTTAT | | ATAAGGCTAGTCCG | | GTGC | | | |
| | | CAGCGTCGACCGAAA | | TTATCAGCGTcg | | | | | |
| | | GGTCGACGCGGCACC | | | | | | | |
| | | GAGTCGGTGC | | | | | | | |
| 3999 | L2_e5_ | GTTTAAGAGCTAGAA | 6517 | GTTTAAGAGCTAGA | 6673 | GACGAAAGTCTGAC | Stem loop | 5 | 86 |
| | 40 | ATAGCAAGTTTAAAT | | AATAGCAAGTTTAA | | GCGGCACCGAGTCG | 2 | | |
| | | AAGGCTAGTCCGTTAT | | ATAAGGCTAGTCCG | | GTGC | | | |
| | | CAGCGTCAGACGAAA | | TTATCAGCGTca | | | | | |
| | | GTCTGACGCGGCACC | | | | | | | |
| | | GAGTCGGTGC | | | | | | | |
| 4000 | L2_e5_ | GTTTAAGAGCTAGAA | 6518 | GTTTAAGAGCTAGA | 6674 | TGGGAAACCGTCAC | Stem loop | 5 | 86 |
| | 41 | ATAGCAAGTTTAAAT | | AATAGCAAGTTTAA | | GCGGCACCGAGTCG | 2 | | |
| | | AAGGCTAGTCCGTTAT | | ATAAGGCTAGTCCG | | GTGC | | | |
| | | CAGCGTGATGGGAAA | | TTATCAGCGTga | | | | | |
| | | CCGTCACGCGGCACC | | | | | | | |
| | | GAGTCGGTGC | | | | | | | |
| 4001 | L2_e5_ | GTTTAAGAGCTAGAA | 6519 | GTTTAAGAGCTAGA | 6675 | GGGGAAACCCCTAC | Stem loop | 5 | 86 |
| | 42 | ATAGCAAGTTTAAAT | | AATAGCAAGTTTAA | | GCGGCACCGAGTCG | 2 | | |
| | | AAGGCTAGTCCGTTAT | | ATAAGGCTAGTCCG | | GTGC | | | |
| | | CAGCGTAGGGGGAAA | | TTATCAGCGTag | | | | | |
| | | CCCCTACGCGGCACC | | | | | | | |
| | | GAGTCGGTGC | | | | | | | |
| 4002 | L2_e5_ | GTTTAAGAGCTAGAA | 6520 | GTTTAAGAGCTAGA | 6676 | CACGAAAGTGGTAC | Stem loop | 5 | 86 |
| | 43 | ATAGCAAGTTTAAAT | | AATAGCAAGTTTAA | | GCGGCACCGAGTCG | 2 | | |
| | | AAGGCTAGTCCGTTAT | | ATAAGGCTAGTCCG | | GTGC | | | |
| | | CAGCGTACCACGAAA | | TTATCAGCGTac | | | | | |
| | | GTGGTACGCGGCACC | | | | | | | |
| | | GAGTCGGTGC | | | | | | | |
| 4003 | L2_e5_ | GTTTAAGAGCTAGAA | 6521 | GTTTAAGAGCTAGA | 6677 | GACGAAAGTCGCAC | Stem loop | 5 | 86 |
| | 44 | ATAGCAAGTTTAAAT | | AATAGCAAGTTTAA | | GCGGCACCGAGTCG | 2 | | |
| | | AAGGCTAGTCCGTTAT | | ATAAGGCTAGTCCG | | GTGC | | | |
| | | CAGCGTGCGACGAAA | | TTATCAGCGTgc | | | | | |
| | | GTCGCACGCGGCACC | | | | | | | |
| | | GAGTCGGTGC | | | | | | | |
| 4004 | L2_e5_ | GTTTAAGAGCTAGAA | 6522 | GTTTAAGAGCTAGA | 6678 | GGGGAAACCCCGAC | Stem loop | 5 | 86 |
| | 45 | ATAGCAAGTTTAAAT | | AATAGCAAGTTTAA | | GCGGCACCGAGTCG | 2 | | |
| | | AAGGCTAGTCCGTTAT | | ATAAGGCTAGTCCG | | GTGC | | | |
| | | CAGCGTCGGGGGAAA | | TTATCAGCGTcg | | | | | |
| | | CCCCGACGCGGCACC | | | | | | | |
| | | GAGTCGGTGC | | | | | | | |
| 4005 | L2_e5_ | GTTTAAGAGCTAGAA | 6523 | GTTTAAGAGCTAGA | 6679 | CGAGAAATCGGTAC | Stem loop | 5 | 86 |
| | 46 | ATAGCAAGTTTAAAT | | AATAGCAAGTTTAA | | GCGGCACCGAGTCG | 2 | | |
| | | AAGGCTAGTCCGTTAT | | ATAAGGCTAGTCCG | | GTGC | | | |
| | | CAGCGTACCGAGAAA | | TTATCAGCGTac | | | | | |
| | | TCGGTACGCGGCACC | | | | | | | |
| | | GAGTCGGTGC | | | | | | | |
| 4006 | L2_e5_ | GTTTAAGAGCTAGAA | 6524 | GTTTAAGAGCTAGA | 6680 | TCGGAAACGACGAC | Stem loop | 5 | 86 |
| | 47 | ATAGCAAGTTTAAAT | | AATAGCAAGTTTAA | | GCGGCACCGAGTCG | 2 | | |
| | | AAGGCTAGTCCGTTAT | | ATAAGGCTAGTCCG | | GTGC | | | |
| | | CAGCGTTGTCGGAAA | | TTATCAGCGTtg | | | | | |
| | | CGACGACGCGGCACC | | | | | | | |
| | | GAGTCGGTGC | | | | | | | |
| 4007 | L2_e5_ | GTTTAAGAGCTAGAA | 6525 | GTTTAAGAGCTAGA | 6681 | ACGGAAATGTCCAC | Stem loop | 5 | 86 |
| | 48 | ATAGCAAGTTTAAAT | | AATAGCAAGTTTAA | | GCGGCACCGAGTCG | 2 | | |
| | | AAGGCTAGTCCGTTAT | | ATAAGGCTAGTCCG | | GTGC | | | |
| | | CAGCGTGGACGGAAA | | TTATCAGCGTgg | | | | | |
| | | TGTCCACGCGGCACC | | | | | | | |
| | | GAGTCGGTGC | | | | | | | |
| 4008 | L2_e5_ | GTTTAAGAGCTAGAA | 6526 | GTTTAAGAGCTAGA | 6682 | GGCGAAAGCCTGAC | Stem loop | 5 | 86 |
| | 49 | ATAGCAAGTTTAAAT | | AATAGCAAGTTTAA | | GCGGCACCGAGTCG | 2 | | |
| | | AAGGCTAGTCCGTTAT | | ATAAGGCTAGTCCG | | GTGC | | | |
| | | CAGCGTCAGGCGAAA | | TTATCAGCGTca | | | | | |
| | | GCCTGACGCGGCACC | | | | | | | |
| | | GAGTCGGTGC | | | | | | | |
| 4009 | L2_e5_ | GTTTAAGAGCTAGAA | 6527 | GTTTAAGAGCTAGA | 6683 | TCCGAAAGGAAGAC | Stem loop | 5 | 86 |
| | 50 | ATAGCAAGTTTAAAT | | AATAGCAAGTTTAA | | GCGGCACCGAGTCG | 2 | | |
| | | AAGGCTAGTCCGTTAT | | ATAAGGCTAGTCCG | | GTGC | | | |
| | | CAGCGTCTTCCGAAA | | TTATCAGCGTct | | | | | |
| | | GGAAGACGCGGCACC | | | | | | | |
| | | GAGTCGGTGC | | | | | | | |
| 4010 | L2_e5_ | GTTTAAGAGCTAGAA | 6528 | GTTTAAGAGCTAGA | 6684 | CGAGAAATCGGAAC | Stem loop | 5 | 86 |
| | 51 | ATAGCAAGTTTAAAT | | AATAGCAAGTTTAA | | GCGGCACCGAGTCG | 2 | | |
| | | AAGGCTAGTCCGTTAT | | ATAAGGCTAGTCCG | | GTGC | | | |
| | | CAGCGTTCCGAGAAA | | TTATCAGCGTtc | | | | | |
| | | TCGGAACGCGGCACC | | | | | | | |
| | | GAGTCGGTGC | | | | | | | |
| 4011 | L2_e5_ | GTTTAAGAGCTAGAA | 6529 | GTTTAAGAGCTAGA | 6685 | GCCGAAAGGTGTAC | Stem loop | 5 | 86 |
| | 52 | ATAGCAAGTTTAAAT | | AATAGCAAGTTTAA | | GCGGCACCGAGTCG | 2 | | |
| | | AAGGCTAGTCCGTTAT | | ATAAGGCTAGTCCG | | GTGC | | | |
| | | CAGCGTACGCCGAAA | | TTATCAGCGTac | | | | | |
| | | GGTGTACGCGGCACC | | | | | | | |
| | | GAGTCGGTGC | | | | | | | |
| 4012 | L2_e5_ | GTTTAAGAGCTAGAA | 6530 | GTTTAAGAGCTAGA | 6686 | CGTGAAAACGCTAC | Stem loop | 5 | 86 |
| | 53 | ATAGCAAGTTTAAAT | | AATAGCAAGTTTAA | | GCGGCACCGAGTCG | 2 | | |
| | | AAGGCTAGTCCGTTAT | | ATAAGGCTAGTCCG | | GTGC | | | |
| | | CAGCGTGGCGTGAAA | | TTATCAGCGTgg | | | | | |
| | | ACGCTACGCGGCACC | | | | | | | |
| | | GAGTCGGTGC | | | | | | | |
| 4013 | L2_e5_ | GTTTAAGAGCTAGAA | 6531 | GTTTAAGAGCTAGA | 6687 | GACGAAAGTCCTAC | Stem loop | 5 | 86 |
| | 54 | ATAGCAAGTTTAAAT | | AATAGCAAGTTTAA | | GCGGCACCGAGTCG | 2 | | |
| | | AAGGCTAGTCCGTTAT | | ATAAGGCTAGTCCG | | GTGC | | | |
| | | CAGCGTGGGACGAAA | | TTATCAGCGTgg | | | | | |
| | | GTCCTACGCGGCACC | | | | | | | |
| | | GAGTCGGTGC | | | | | | | |
| 4014 | L2_e5_ | GTTTAAGAGCTAGAA | 6532 | GTTTAAGAGCTAGA | 6688 | GGGGAAACCCAGAC | Stem loop | 5 | 86 |
| | 55 | ATAGCAAGTTTAAAT | | AATAGCAAGTTTAA | | GCGGCACCGAGTCG | 2 | | |
| | | AAGGCTAGTCCGTTAT | | ATAAGGCTAGTCCG | | GTGC | | | |
| | | CAGCGTCTGGGGAAA | | TTATCAGCGTct | | | | | |
| | | CCCAGACGCGGCACC | | | | | | | |
| | | GAGTCGGTGC | | | | | | | |
| 4015 | L2_e5_ | GTTTAAGAGCTAGAA | 6533 | GTTTAAGAGCTAGA | 6689 | ATCGAAAGATGCAC | Stem loop | 5 | 86 |
| | 56 | ATAGCAAGTTTAAAT | | AATAGCAAGTTTAA | | GCGGCACCGAGTCG | 2 | | |
| | | AAGGCTAGTCCGTTAT | | ATAAGGCTAGTCCG | | GTGC | | | |
| | | CAGCGTGCATCGAAA | | TTATCAGCGTgc | | | | | |
| | | GATGCACGCGGCACC | | | | | | | |
| | | GAGTCGGTGC | | | | | | | |
| 4016 | L2_e5_ | GTTTAAGAGCTAGAA | 6534 | GTTTAAGAGCTAGA | 6690 | CGCGAAAGCGTTAC | Stem loop | 5 | 86 |
| | 57 | ATAGCAAGTTTAAAT | | AATAGCAAGTTTAA | | GCGGCACCGAGTCG | 2 | | |
| | | AAGGCTAGTCCGTTAT | | ATAAGGCTAGTCCG | | GTGC | | | |
| | | CAGCGTAACGCGAAA | | TTATCAGCGTaa | | | | | |
| | | GCGTTACGCGGCACC | | | | | | | |
| | | GAGTCGGTGC | | | | | | | |
| 4017 | L2_e5_ | GTTTAAGAGCTAGAA | 6535 | GTTTAAGAGCTAGA | 6691 | CAGGAAACTGGCAC | Stem loop | 5 | 86 |
| | 58 | ATAGCAAGTTTAAAT | | AATAGCAAGTTTAA | | GCGGCACCGAGTCG | 2 | | |
| | | AAGGCTAGTCCGTTAT | | ATAAGGCTAGTCCG | | GTGC | | | |
| | | CAGCGTGCCAGGAAA | | TTATCAGCGTgc | | | | | |
| | | CTGGCACGCGGCACC | | | | | | | |
| | | GAGTCGGTGC | | | | | | | |
| 4018 | L2_e5_ | GTTTAAGAGCTAGAA | 6536 | GTTTAAGAGCTAGA | 6692 | ACGGAAACGTGAAC | Stem loop | 5 | 86 |
| | 59 | ATAGCAAGTTTAAAT | | AATAGCAAGTTTAA | | GCGGCACCGAGTCG | 2 | | |
| | | AAGGCTAGTCCGTTAT | | ATAAGGCTAGTCCG | | GTGC | | | |
| | | CAGCGTTCACGGAAA | | TTATCAGCGTtc | | | | | |
| | | CGTGAACGCGGCACC | | | | | | | |
| | | GAGTCGGTGC | | | | | | | |
| 4019 | L2_e5_ | GTTTAAGAGCTAGAA | 6537 | GTTTAAGAGCTAGA | 6693 | GACGAAAGTCGTAC | Stem loop | 5 | 86 |
| | 60 | ATAGCAAGTTTAAAT | | AATAGCAAGTTTAA | | GCGGCACCGAGTCG | 2 | | |
| | | AAGGCTAGTCCGTTAT | | ATAAGGCTAGTCCG | | GTGC | | | |
| | | CAGCGTACGACGAAA | | TTATCAGCGTac | | | | | |
| | | GTCGTACGCGGCACC | | | | | | | |
| | | GAGTCGGTGC | | | | | | | |
| 4020 | L2_e5_ | GTTTAAGAGCTAGAA | 6538 | GTTTAAGAGCTAGA | 6694 | TGGGAAACCAGCAC | Stem loop | 5 | 86 |
| | 61 | ATAGCAAGTTTAAAT | | AATAGCAAGTTTAA | | GCGGCACCGAGTCG | 2 | | |
| | | AAGGCTAGTCCGTTAT | | ATAAGGCTAGTCCG | | GTGC | | | |
| | | CAGCGTGCTGGGAAA | | TTATCAGCGTgc | | | | | |
| | | CCAGCACGCGGCACC | | | | | | | |
| | | GAGTCGGTGC | | | | | | | |
| 4021 | L2_e5_ | GTTTAAGAGCTAGAA | 6539 | GTTTAAGAGCTAGA | 6695 | CCAGAAATGGGGAC | Stem loop | 5 | 86 |
| | 62 | ATAGCAAGTTTAAAT | | AATAGCAAGTTTAA | | GCGGCACCGAGTCG | 2 | | |
| | | AAGGCTAGTCCGTTAT | | ATAAGGCTAGTCCG | | GTGC | | | |
| | | CAGCGTCTCCAGAAA | | TTATCAGCGTct | | | | | |
| | | TGGGGACGCGGCACC | | | | | | | |
| | | GAGTCGGTGC | | | | | | | |
| 4022 | L2_e5_ | GTTTAAGAGCTAGAA | 6540 | GTTTAAGAGCTAGA | 6696 | GGGGAAACCCCAAC | Stem loop | 5 | 86 |
| | 63 | ATAGCAAGTTTAAAT | | AATAGCAAGTTTAA | | GCGGCACCGAGTCG | 2 | | |
| | | AAGGCTAGTCCGTTAT | | ATAAGGCTAGTCCG | | GTGC | | | |
| | | CAGCGTTGGGGGAAA | | TTATCAGCGTtg | | | | | |
| | | CCCCAACGCGGCACC | | | | | | | |
| | | GAGTCGGTGC | | | | | | | |
| 4023 | L2_e5_ | GTTTAAGAGCTAGAA | 6541 | GTTTAAGAGCTAGA | 6697 | CCCGAAAGGGCTAC | Stem loop | 5 | 86 |
| | 64 | ATAGCAAGTTTAAAT | | AATAGCAAGTTTAA | | GCGGCACCGAGTCG | 2 | | |
| | | AAGGCTAGTCCGTTAT | | ATAAGGCTAGTCCG | | GTGC | | | |
| | | CAGCGTAGCCCGAAA | | TTATCAGCGTag | | | | | |
| | | GGGCTACGCGGCACC | | | | | | | |
| | | GAGTCGGTGC | | | | | | | |
| 4024 | L2_e5_ | GTTTAAGAGCTAGAA | 6542 | GTTTAAGAGCTAGA | 6698 | CCAGAAATGGGTAC | Stem loop | 5 | 86 |
| | 65 | ATAGCAAGTTTAAAT | | AATAGCAAGTTTAA | | GCGGCACCGAGTCG | 2 | | |
| | | AAGGCTAGTCCGTTAT | | ATAAGGCTAGTCCG | | GTGC | | | |
| | | CAGCGTACCCAGAAA | | TTATCAGCGTac | | | | | |
| | | TGGGTACGCGGCACC | | | | | | | |
| | | GAGTCGGTGC | | | | | | | |
| 4025 | L2_e5_ | GTTTAAGAGCTAGAA | 6543 | GTTTAAGAGCTAGA | 6699 | CGTGAAAGCGCTAC | Stem loop | 5 | 86 |
| | 66 | ATAGCAAGTTTAAAT | | AATAGCAAGTTTAA | | GCGGCACCGAGTCG | 2 | | |
| | | AAGGCTAGTCCGTTAT | | ATAAGGCTAGTCCG | | GTGC | | | |
| | | CAGCGTAGCGTGAAA | | TTATCAGCGTag | | | | | |
| | | GCGCTACGCGGCACC | | | | | | | |
| | | GAGTCGGTGC | | | | | | | |
| 4026 | L2_e5_ | GTTTAAGAGCTAGAA | 6544 | GTTTAAGAGCTAGA | 6700 | CTAGAAATAGGCAC | Stem loop | 5 | 86 |
| | 67 | ATAGCAAGTTTAAAT | | AATAGCAAGTTTAA | | GCGGCACCGAGTCG | 2 | | |
| | | AAGGCTAGTCCGTTAT | | ATAAGGCTAGTCCG | | GTGC | | | |
| | | CAGCGTGCCTAGAAA | | TTATCAGCGTgc | | | | | |
| | | TAGGCACGCGGCACC | | | | | | | |
| | | GAGTCGGTGC | | | | | | | |
| 4027 | L2_e5_ | GTTTAAGAGCTAGAA | 6545 | GTTTAAGAGCTAGA | 6701 | GTCGAAAGACAGAC | Stem loop | 5 | 86 |
| | 68 | ATAGCAAGTTTAAAT | | AATAGCAAGTTTAA | | GCGGCACCGAGTCG | 2 | | |
| | | AAGGCTAGTCCGTTAT | | ATAAGGCTAGTCCG | | GTGC | | | |
| | | CAGCGTCTGTCGAAA | | TTATCAGCGTct | | | | | |
| | | GACAGACGCGGCACC | | | | | | | |
| | | GAGTCGGTGC | | | | | | | |
| 4028 | L2_e5_ | GTTTAAGAGCTAGAA | 6546 | GTTTAAGAGCTAGA | 6649 | AGGGAAACCTGCAC | Stem loop | 5 | 86 |
| | 69 | ATAGCAAGTTTAAAT | | AATAGCAAGTTTAA | | GCGGCACCGAGTCG | 2 | | |
| | | AAGGCTAGTCCGTTAT | | ATAAGGCTAGTCCG | | GTGC | | | |
| | | CAGCGTGCAGGGAAA | | TTATCAGCGTgc | | | | | |
| | | CCTGCACGCGGCACC | | | | | | | |
| | | GAGTCGGTGC | | | | | | | |
| 4029 | L2_e5_ | GTTTAAGAGCTAGAA | 6547 | GTTTAAGAGCTAGA | 6702 | AGGGAAACCTACAC | Stem loop | 5 | 86 |
| | 70 | ATAGCAAGTTTAAAT | | AATAGCAAGTTTAA | | GCGGCACCGAGTCG | 2 | | |
| | | AAGGCTAGTCCGTTAT | | ATAAGGCTAGTCCG | | GTGC | | | |
| | | CAGCGTGTAGGGAAA | | TTATCAGCGTgt | | | | | |
| | | CCTACACGCGGCACC | | | | | | | |
| | | GAGTCGGTGC | | | | | | | |
| 4030 | L2_e5_ | GTTTAAGAGCTAGAA | 6548 | GTTTAAGAGCTAGA | 6703 | GCTGAAAGGCGGAC | Stem loop | 5 | 86 |
| | 71 | ATAGCAAGTTTAAAT | | AATAGCAAGTTTAA | | GCGGCACCGAGTCG | 2 | | |
| | | AAGGCTAGTCCGTTAT | | ATAAGGCTAGTCCG | | GTGC | | | |
| | | CAGCGTCCGCTGAAA | | TTATCAGCGTcc | | | | | |
| | | GGCGGACGCGGCACC | | | | | | | |
| | | GAGTCGGTGC | | | | | | | |
| 4031 | L2_e5_ | GTTTAAGAGCTAGAA | 6549 | GTTTAAGAGCTAGA | 6704 | GTCGAAAGGCACAC | Stem loop | 5 | 86 |
| | 72 | ATAGCAAGTTTAAAT | | AATAGCAAGTTTAA | | GCGGCACCGAGTCG | 2 | | |
| | | AAGGCTAGTCCGTTAT | | ATAAGGCTAGTCCG | | GTGC | | | |
| | | CAGCGTGTGTCGAAA | | TTATCAGCGTgt | | | | | |
| | | GGCACACGCGGCACC | | | | | | | |
| | | GAGTCGGTGC | | | | | | | |
| 4032 | L2_e5_ | GTTTAAGAGCTAGAA | 6550 | GTTTAAGAGCTAGA | 6705 | TACGAAAGTGGGAC | Stem loop | 5 | 86 |
| | 73 | ATAGCAAGTTTAAAT | | AATAGCAAGTTTAA | | GCGGCACCGAGTCG | 2 | | |
| | | AAGGCTAGTCCGTTAT | | ATAAGGCTAGTCCG | | GTGC | | | |
| | | CAGCGTCCTACGAAA | | TTATCAGCGTcc | | | | | |
| | | GTGGGACGCGGCACC | | | | | | | |
| | | GAGTCGGTGC | | | | | | | |
| 4033 | L2_e5_ | GTTTAAGAGCTAGAA | 6551 | GTTTAAGAGCTAGA | 6706 | GGGGAAACCCACAC | Stem loop | 5 | 86 |
| | 74 | ATAGCAAGTTTAAAT | | AATAGCAAGTTTAA | | GCGGCACCGAGTCG | 2 | | |
| | | AAGGCTAGTCCGTTAT | | ATAAGGCTAGTCCG | | GTGC | | | |
| | | CAGCGTGTGGGGAAA | | TTATCAGCGTgt | | | | | |
| | | CCCACACGCGGCACC | | | | | | | |
| | | GAGTCGGTGC | | | | | | | |
| 4034 | L2_e5_ | GTTTAAGAGCTAGAA | 6552 | GTTTAAGAGCTAGA | 6707 | GGTGAAAACTCGAC | Stem loop | 5 | 86 |
| | 75 | ATAGCAAGTTTAAAT | | AATAGCAAGTTTAA | | GCGGCACCGAGTCG | 2 | | |
| | | AAGGCTAGTCCGTTAT | | ATAAGGCTAGTCCG | | GTGC | | | |
| | | CAGCGTCGGGTGAAA | | TTATCAGCGTcg | | | | | |
| | | ACTCGACGCGGCACC | | | | | | | |
| | | GAGTCGGTGC | | | | | | | |
| 4035 | L2_e5_ | GTTTAAGAGCTAGAA | 6553 | GTTTAAGAGCTAGA | 6708 | TCGGAAACGACAAC | Stem loop | 5 | 86 |
| | 76 | ATAGCAAGTTTAAAT | | AATAGCAAGTTTAA | | GCGGCACCGAGTCG | 2 | | |
| | | AAGGCTAGTCCGTTAT | | ATAAGGCTAGTCCG | | GTGC | | | |
| | | CAGCGTTGTCGGAAA | | TTATCAGCGTtg | | | | | |
| | | CGACAACGCGGCACC | | | | | | | |
| | | GAGTCGGTGC | | | | | | | |
| 4036 | L2_e5_ | GTTTAAGAGCTAGAA | 6554 | GTTTAAGAGCTAGA | 6709 | CCCGAAAGGGGGAC | Stem loop | 5 | 86 |
| | 77 | ATAGCAAGTTTAAAT | | AATAGCAAGTTTAA | | GCGGCACCGAGTCG | 2 | | |
| | | AAGGCTAGTCCGTTAT | | ATAAGGCTAGTCCG | | GTGC | | | |
| | | CAGCGTCCCCCGAAA | | TTATCAGCGTcc | | | | | |
| | | GGGGGACGCGGCACC | | | | | | | |
| | | GAGTCGGTGC | | | | | | | |
| 4037 | L2_e5_ | GTTTAAGAGCTAGAA | 6555 | GTTTAAGAGCTAGA | 6710 | GGCGAAAGCCCAAC | Stem loop | 5 | 86 |
| | 78 | ATAGCAAGTTTAAAT | | AATAGCAAGTTTAA | | GCGGCACCGAGTCG | 2 | | |
| | | AAGGCTAGTCCGTTAT | | ATAAGGCTAGTCCG | | GTGC | | | |
| | | CAGCGTTGGGCGAAA | | TTATCAGCGTtg | | | | | |
| | | GCCCAACGCGGCACC | | | | | | | |
| | | GAGTCGGTGC | | | | | | | |
| 4038 | L2_e5_ | GTTTAAGAGCTAGAA | 6556 | GTTTAAGAGCTAGA | 6711 | ACCGAAAGGTTCAC | Stem loop | 5 | 86 |
| | 79 | ATAGCAAGTTTAAAT | | AATAGCAAGTTTAA | | GCGGCACCGAGTCG | 2 | | |
| | | AAGGCTAGTCCGTTAT | | ATAAGGCTAGTCCG | | GTGC | | | |
| | | CAGCGTGGACCGAAA | | TTATCAGCGTgg | | | | | |
| | | GGTTCACGCGGCACC | | | | | | | |
| | | GAGTCGGTGC | | | | | | | |
| 4039 | L2_e5_ | GTTTAAGAGCTAGAA | 6557 | GTTTAAGAGCTAGA | 6712 | CGCGAAAGCGATAC | Stem loop | 5 | 86 |
| | 80 | ATAGCAAGTTTAAAT | | AATAGCAAGTTTAA | | GCGGCACCGAGTCG | 2 | | |
| | | AAGGCTAGTCCGTTAT | | ATAAGGCTAGTCCG | | GTGC | | | |
| | | CAGCGTGTCGCGAAA | | TTATCAGCGTgt | | | | | |
| | | GCGATACGCGGCACC | | | | | | | |
| | | GAGTCGGTGC | | | | | | | |
| 4040 | L2_e5_ | GTTTAAGAGCTAGAA | 6558 | GTTTAAGAGCTAGA | 6713 | TGCGAAAGCAGGAC | Stem loop | 5 | 86 |
| | 81 | ATAGCAAGTTTAAAT | | AATAGCAAGTTTAA | | GCGGCACCGAGTCG | 2 | | |
| | | AAGGCTAGTCCGTTAT | | ATAAGGCTAGTCCG | | GTGC | | | |
| | | CAGCGTCCTGCGAAA | | TTATCAGCGTcc | | | | | |
| | | GCAGGACGCGGCACC | | | | | | | |
| | | GAGTCGGTGC | | | | | | | |
| 4041 | L2_e5_ | GTTTAAGAGCTAGAA | 6559 | GTTTAAGAGCTAGA | 6714 | CCTGAAAAGGTCAC | Stem loop | 5 | 86 |
| | 82 | ATAGCAAGTTTAAAT | | AATAGCAAGTTTAA | | GCGGCACCGAGTCG | 2 | | |
| | | AAGGCTAGTCCGTTAT | | ATAAGGCTAGTCCG | | GTGC | | | |
| | | CAGCGTGACCTGAAA | | TTATCAGCGTga | | | | | |
| | | AGGTCACGCGGCACC | | | | | | | |
| | | GAGTCGGTGC | | | | | | | |
| 4042 | L2_e5_ | GTTTAAGAGCTAGAA | 6560 | GTTTAAGAGCTAGA | 6715 | ACCGAAAGGTGCAC | Stem loop | 5 | 86 |
| | 83 | ATAGCAAGTTTAAAT | | AATAGCAAGTTTAA | | GCGGCACCGAGTCG | 2 | | |
| | | AAGGCTAGTCCGTTAT | | ATAAGGCTAGTCCG | | GTGC | | | |
| | | CAGCGTGCACCGAAA | | TTATCAGCGTgc | | | | | |
| | | GGTGCACGCGGCACC | | | | | | | |
| | | GAGTCGGTGC | | | | | | | |
| 4043 | L2_e5_ | GTTTAAGAGCTAGAA | 6561 | GTTTAAGAGCTAGA | 6716 | GGCGAAAGCCCTAC | Stem loop | 5 | 86 |
| | 84 | ATAGCAAGTTTAAAT | | AATAGCAAGTTTAA | | GCGGCACCGAGTCG | 2 | | |
| | | AAGGCTAGTCCGTTAT | | ATAAGGCTAGTCCG | | GTGC | | | |
| | | CAGCGTAGGGCGAAA | | TTATCAGCGTag | | | | | |
| | | GCCCTACGCGGCACC | | | | | | | |
| | | GAGTCGGTGC | | | | | | | |
| 4044 | L2_e5_ | GTTTAAGAGCTAGAA | 6562 | GTTTAAGAGCTAGA | 6717 | TCGGAAACGGTCAC | Stem loop | 5 | 86 |
| | 85 | ATAGCAAGTTTAAAT | | AATAGCAAGTTTAA | | GCGGCACCGAGTCG | 2 | | |
| | | AAGGCTAGTCCGTTAT | | ATAAGGCTAGTCCG | | GTGC | | | |
| | | CAGCGTGATCGGAAA | | TTATCAGCGTga | | | | | |
| | | CGGTCACGCGGCACC | | | | | | | |
| | | GAGTCGGTGC | | | | | | | |
| 4045 | L2_e5_ | GTTTAAGAGCTAGAA | 6563 | GTTTAAGAGCTAGA | 6718 | CGTGAAAGCGTGAC | Stem loop | 5 | 86 |
| | 86 | ATAGCAAGTTTAAAT | | AATAGCAAGTTTAA | | GCGGCACCGAGTCG | 2 | | |
| | | AAGGCTAGTCCGTTAT | | ATAAGGCTAGTCCG | | GTGC | | | |
| | | CAGCGTCGCGTGAAA | | TTATCAGCGTcg | | | | | |
| | | GCGTGACGCGGCACC | | | | | | | |
| | | GAGTCGGTGC | | | | | | | |
| 4046 | L2_e5_ | GTTTAAGAGCTAGAA | 6564 | GTTTAAGAGCTAGA | 6712 | CGCGAAAGCGATAC | Stem loop | 5 | 86 |
| | 87 | ATAGCAAGTTTAAAT | | AATAGCAAGTTTAA | | GCGGCACCGAGTCG | 2 | | |
| | | AAGGCTAGTCCGTTAT | | ATAAGGCTAGTCCG | | GTGC | | | |
| | | CAGCGTATCGCGAAA | | TTATCAGCGTat | | | | | |
| | | GCGATACGCGGCACC | | | | | | | |
| | | GAGTCGGTGC | | | | | | | |
| 4047 | L2_e5_ | GTTTAAGAGCTAGAA | 6565 | GTTTAAGAGCTAGA | 6719 | CAGGAAACTGGGAC | Stem loop | 5 | 86 |
| | 88 | ATAGCAAGTTTAAAT | | AATAGCAAGTTTAA | | GCGGCACCGAGTCG | 2 | | |
| | | AAGGCTAGTCCGTTAT | | ATAAGGCTAGTCCG | | GTGC | | | |
| | | CAGCGTCCCAGGAAA | | TTATCAGCGTcc | | | | | |
| | | CTGGGACGCGGCACC | | | | | | | |
| | | GAGTCGGTGC | | | | | | | |
| 4048 | L2_e5_ | GTTTAAGAGCTAGAA | 6566 | GTTTAAGAGCTAGA | 6720 | GCCGAAAGGCGGAC | Stem loop | 5 | 86 |
| | 89 | ATAGCAAGTTTAAAT | | AATAGCAAGTTTAA | | GCGGCACCGAGTCG | 2 | | |
| | | AAGGCTAGTCCGTTAT | | ATAAGGCTAGTCCG | | GTGC | | | |
| | | CAGCGTCCGCCGAAA | | TTATCAGCGTcc | | | | | |
| | | GGCGGACGCGGCACC | | | | | | | |
| | | GAGTCGGTGC | | | | | | | |
| 4049 | L2_e5_ | GTTTAAGAGCTAGAA | 6567 | GTTTAAGAGCTAGA | 6659 | CGCGAAAGCGTGAC | Stem loop | 5 | 86 |
| | 90 | ATAGCAAGTTTAAAT | | AATAGCAAGTTTAA | | GCGGCACCGAGTCG | 2 | | |
| | | AAGGCTAGTCCGTTAT | | ATAAGGCTAGTCCG | | GTGC | | | |
| | | CAGCGTCACGCGAAA | | TTATCAGCGTca | | | | | |
| | | GCGTGACGCGGCACC | | | | | | | |
| | | GAGTCGGTGC | | | | | | | |
| 4050 | L2_e5_ | GTTTAAGAGCTAGAA | 6568 | GTTTAAGAGCTAGA | 6721 | GCAGAAATGCAGAC | Stem loop | 5 | 86 |
| | 91 | ATAGCAAGTTTAAAT | | AATAGCAAGTTTAA | | GCGGCACCGAGTCG | 2 | | |
| | | AAGGCTAGTCCGTTAT | | ATAAGGCTAGTCCG | | GTGC | | | |
| | | CAGCGTCTGCAGAAA | | TTATCAGCGTct | | | | | |
| | | TGCAGACGCGGCACC | | | | | | | |
| | | GAGTCGGTGC | | | | | | | |
| 4051 | L2_e5_ | GTTTAAGAGCTAGAA | 6569 | GTTTAAGAGCTAGA | 6722 | TAGGAAACTACCAC | Stem loop | 5 | 86 |
| | 92 | ATAGCAAGTTTAAAT | | AATAGCAAGTTTAA | | GCGGCACCGAGTCG | 2 | | |
| | | AAGGCTAGTCCGTTAT | | ATAAGGCTAGTCCG | | GTGC | | | |
| | | CAGCGTGGTAGGAAA | | TTATCAGCGTgg | | | | | |
| | | CTACCACGCGGCACC | | | | | | | |
| | | GAGTCGGTGC | | | | | | | |
| 4052 | L2_e5_ | GTTTAAGAGCTAGAA | 6570 | GTTTAAGAGCTAGA | 6723 | CCTGAAAAGGCCAC | Stem loop | 5 | 86 |
| | 93 | ATAGCAAGTTTAAAT | | AATAGCAAGTTTAA | | GCGGCACCGAGTCG | 2 | | |
| | | AAGGCTAGTCCGTTAT | | ATAAGGCTAGTCCG | | GTGC | | | |
| | | CAGCGTGGCCTGAAA | | TTATCAGCGTgg | | | | | |
| | | AGGCCACGCGGCACC | | | | | | | |
| | | GAGTCGGTGC | | | | | | | |
| 4053 | L2_e5_ | GTTTAAGAGCTAGAA | 6571 | GTTTAAGAGCTAGA | 6724 | GACGAAAGTCTCAC | Stem loop | 5 | 86 |
| | 94 | ATAGCAAGTTTAAAT | | AATAGCAAGTTTAA | | GCGGCACCGAGTCG | 2 | | |
| | | AAGGCTAGTCCGTTAT | | ATAAGGCTAGTCCG | | GTGC | | | |
| | | CAGCGTGAGACGAAA | | TTATCAGCGTga | | | | | |
| | | GTCTCACGCGGCACC | | | | | | | |
| | | GAGTCGGTGC | | | | | | | |
| 4054 | L2_e5_ | GTTTAAGAGCTAGAA | 6572 | GTTTAAGAGCTAGA | 6725 | ACCGAAAGGTGGAC | Stem loop | 5 | 86 |
| | 95 | ATAGCAAGTTTAAAT | | AATAGCAAGTTTAA | | GCGGCACCGAGTCG | 2 | | |
| | | AAGGCTAGTCCGTTAT | | ATAAGGCTAGTCCG | | GTGC | | | |
| | | CAGCGTTCACCGAAA | | TTATCAGCGTtc | | | | | |
| | | GGTGGACGCGGCACC | | | | | | | |
| | | GAGTCGGTGC | | | | | | | |
| 4055 | L2_e5_ | GTTTAAGAGCTAGAA | 6573 | GTTTAAGAGCTAGA | 6726 | TCCGAAAGGAACAC | Stem loop | 5 | 86 |
| | 96 | ATAGCAAGTTTAAAT | | AATAGCAAGTTTAA | | GCGGCACCGAGTCG | 2 | | |
| | | AAGGCTAGTCCGTTAT | | ATAAGGCTAGTCCG | | GTGC | | | |
| | | CAGCGTGTTCCGAAA | | TTATCAGCGTgt | | | | | |
| | | GGAACACGCGGCACC | | | | | | | |
| | | GAGTCGGTGC | | | | | | | |
| 4056 | L2_e5_ | GTTTAAGAGCTAGAA | 6574 | GTTTAAGAGCTAGA | 672.7 | GCGGAAACGCGTAC | Stem loop | 5 | 86 |
| | 97 | ATAGCAAGTTTAAAT | | AATAGCAAGTTTAA | | GCGGCACCGAGTCG | 7 | | |
| | | AAGGCTAGTCCGTTAT | | ATAAGGCTAGTCCG | | GTGC | | | |
| | | CAGCGTGCGCGGAAA | | TTATCAGCGTor | | | | | |
| | | CGCGTACGCGGCACC | | | | | | | |
| | | GAGTOGGTGC | | | | | | | |
| 4057 | L2_e5_ | GTTTAAGAGCTAGAA | 6575 | GTTTAAGAGCTAGA | 6728 | ACCGAAAGGTGAAC | Stem loop | 5 | 86 |
| | 98 | ATAGCAAGTTTAAAT | | AATAGCAAGTTTAA | | GCGGCACCGAGTCG | 2 | | |
| | | AAGGCTAGTCCGTTAT | | ATAAGGCTAGTCCG | | GTGC | | | |
| | | CAGCGTTCACCGAAA | | TTATCAGCGTtc | | | | | |
| | | GGTGAACGCGGCACC | | | | | | | |
| | | GAGTCGGTGC | | | | | | | |
| 4058 | L2_e5_ | GTTTAAGAGCTAGAA | 6576 | GTTTAAGAGCTAGA | 6651 | CCCGAAAGGGTTAC | Stem loop | 5 | 86 |
| | 99 | ATAGCAAGTTTAAAT | | AATAGCAAGTTTAA | | GCGGCACCGAGTCG | 2 | | |
| | | AAGGCTAGTCCGTTAT | | ATAAGGCTAGTCCG | | GTGC | | | |
| | | CAGCGTGACCCGAAA | | TTATCAGCGTga | | | | | |
| | | GGGTTACGCGGCACC | | | | | | | |
| | | GAGTCGGTGC | | | | | | | |
| 4059 | L2_e5_ | GTTTAAGAGCTAGAA | 6577 | GTTTAAGAGCTAGA | 6729 | ACGGAAACGTGCAC | Stem loop | 5 | 86 |
| | 100 | ATAGCAAGTTTAAAT | | AATAGCAAGTTTAA | | GCGGCACCGAGTCG | 2 | | |
| | | AAGGCTAGTCCGTTAT | | ATAAGGCTAGTCCG | | GTGC | | | |
| | | CAGCGTGTACGGAAA | | TTATCAGCGTgt | | | | | |
| | | CGTGCACGCGGCACC | | | | | | | |
| | | GAGTCGGTGC | | | | | | | |
| 4060 | L2_e6_ | GTTTAAGAGCTAGAA | 6578 | GTTTAAGAGCTAGA | 6730 | GCGGAAACGCATGA | Stem loop | 6 | 88 |
| | 1 | ATAGCAAGTTTAAAT | | AATAGCAAGTTTAA | | CGCGGCACCGAGTC | 2 | | |
| | | AAGGCTAGTCCGTTAT | | ATAAGGCTAGTCCG | | GGTGC | | | |
| | | CAGCGTCATGCGGAA | | TTATCAGCGTcat | | | | | |
| | | ACGCATGACGCGGCA | | | | | | | |
| | | CCGAGTCGGTGC | | | | | | | |
| 4061 | L2_e6_ | GTTTAAGAGCTAGAA | 6579 | GTTTAAGAGCTAGA | 6731 | GTTGAAAAACCCCA | Stem loop | 6 | 88 |
| | 2 | ATAGCAAGTTTAAAT | | AATAGCAAGTTTAA | | CGCGGCACCGAGTC | 2 | | |
| | | AAGGCTAGTCCGTTAT | | ATAAGGCTAGTCCG | | GGTGC | | | |
| | | CAGCGTGGGGTTGAA | | TTATCAGCGTggg | | | | | |
| | | AAACCCCACGCGGCA | | | | | | | |
| | | CCGAGTCGGTGC | | | | | | | |
| 4062 | L2_e6_ | GTTTAAGAGCTAGAA | 6580 | GTTTAAGAGCTAGA | 6732 | AGCGAAAGCTGTCA | Stem loop | 6 | 88 |
| | 3 | ATAGCAAGTTTAAAT | | AATAGCAAGTTTAA | | CGCGGCACCGAGTC | 2 | | |
| | | AAGGCTAGTCCGTTAT | | ATAAGGCTAGTCCG | | GGTGC | | | |
| | | CAGCGTGACAGCGAA | | TTATCAGCGTgac | | | | | |
| | | AGCTGTCACGCGGCA | | | | | | | |
| | | CCGAGTCGGTGC | | | | | | | |
| 4063 | L2_e6_ | GTTTAAGAGCTAGAA | 6581 | GTTTAAGAGCTAGA | 6733 | GTAGAAATACGCTA | Stem loop | 6 | 88 |
| | 4 | ATAGCAAGTTTAAAT | | AATAGCAAGTTTAA | | CGCGGCACCGAGTC | 2 | | |
| | | AAGGCTAGTCCGTTAT | | ATAAGGCTAGTCCG | | GGTGC | | | |
| | | CAGCGTGGCGTAGAA | | TTATCAGCGTggc | | | | | |
| | | ATACGCTACGCGGCA | | | | | | | |
| | | CCGAGTCGGTGC | | | | | | | |
| 4064 | L2_e6_ | GTTTAAGAGCTAGAA | 6582 | GTTTAAGAGCTAGA | 6734 | ACGGAAACGTTGCA | Stem loop | 6 | 88 |
| | 5 | ATAGCAAGTTTAAAT | | AATAGCAAGTTTAA | | CGCGGCACCGAGTC | 2 | | |
| | | AAGGCTAGTCCGTTAT | | ATAAGGCTAGTCCG | | GGTGC | | | |
| | | CAGCGTGTAACGGAA | | TTATCAGCGTgta | | | | | |
| | | ACGTTGCACGCGGCA | | | | | | | |
| | | CCGAGTCGGTGC | | | | | | | |
| 4065 | L2_e6_ | GTTTAAGAGCTAGAA | 6583 | GTTTAAGAGCTAGA | 6735 | CACGAAAGTGACGA | Stem loop | 6 | 88 |
| | 6 | ATAGCAAGTTTAAAT | | AATAGCAAGTTTAA | | CGCGGCACCGAGTC | 2 | | |
| | | AAGGCTAGTCCGTTAT | | ATAAGGCTAGTCCG | | GGTGC | | | |
| | | CAGCGTCGTCACGAA | | TTATCAGCGTcgt | | | | | |
| | | AGTGACGACGCGGCA | | | | | | | |
| | | CCGAGTCGGTGC | | | | | | | |
| 4066 | L2_e6_ | GTTTAAGAGCTAGAA | 6584 | GTTTAAGAGCTAGA | 6736 | ACCGAAAGGTGTGA | Stem loop | 6 | 88 |
| | 7 | ATAGCAAGTTTAAAT | | AATAGCAAGTTTAA | | CGCGGCACCGAGTC | 2 | | |
| | | AAGGCTAGTCCGTTAT | | ATAAGGCTAGTCCG | | GGTGC | | | |
| | | CAGCGTTACACCGAA | | TTATCAGCGTtac | | | | | |
| | | AGGTGTGACGCGGCA | | | | | | | |
| | | CCGAGTCGGTGC | | | | | | | |
| 4067 | L2_e6_ | GTTTAAGAGCTAGAA | 6585 | GTTTAAGAGCTAGA | 6737 | GCGGAAACGCGTCA | Stem loop | 6 | 88 |
| | 8 | ATAGCAAGTTTAAAT | | AATAGCAAGTTTAA | | CGCGGCACCGAGTC | 2 | | |
| | | AAGGCTAGTCCGTTAT | | ATAAGGCTAGTCCG | | GGTGC | | | |
| | | CAGCGTGACGCGGAA | | TTATCAGCGTgac | | | | | |
| | | ACGCGTCACGCGGCA | | | | | | | |
| | | CCGAGTCGGTGC | | | | | | | |
| 4068 | L2_e6_ | GTTTAAGAGCTAGAA | 6586 | GTTTAAGAGCTAGA | 6738 | GCCGAAAGGCAACA | Stem loop | 6 | 88 |
| | 9 | ATAGCAAGTTTAAAT | | AATAGCAAGTTTAA | | CGCGGCACCGAGTC | 2 | | |
| | | AAGGCTAGTCCGTTAT | | ATAAGGCTAGTCCG | | GGTGC | | | |
| | | CAGCGTGTTGCCGAA | | TTATCAGCGTgtt | | | | | |
| | | AGGCAACACGCGGCA | | | | | | | |
| | | CCGAGTCGGTGC | | | | | | | |
| 4069 | L2_e6_ | GTTTAAGAGCTAGAA | 6587 | GTTTAAGAGCTAGA | 6739 | GGCGAAAGCCTTAA | Stem loop | 6 | 88 |
| | 10 | ATAGCAAGTTTAAAT | | AATAGCAAGTTTAA | | CGCGGCACCGAGTC | 2 | | |
| | | AAGGCTAGTCCGTTAT | | ATAAGGCTAGTCCG | | GGTGC | | | |
| | | CAGCGTTAAGGCGAA | | TTATCAGCGTtaa | | | | | |
| | | AGCCTTAACGCGGCA | | | | | | | |
| | | CCGAGTCGGTGC | | | | | | | |
| 4070 | L2_e6_ | GTTTAAGAGCTAGAA | 6588 | GTTTAAGAGCTAGA | 6740 | CGGGAAACCGGGGA | Stem loop | 6 | 88 |
| | 11 | ATAGCAAGTTTAAAT | | AATAGCAAGTTTAA | | CGCGGCACCGAGTC | 2 | | |
| | | AAGGCTAGTCCGTTAT | | ATAAGGCTAGTCCG | | GGTGC | | | |
| | | CAGCGTCTCCGGGAA | | TTATCAGCGTctc | | | | | |
| | | ACCGGGGACGCGGCA | | | | | | | |
| | | CCGAGTCGGTGC | | | | | | | |
| 4071 | L2_e6_ | GTTTAAGAGCTAGAA | 6589 | GTTTAAGAGCTAGA | 6741 | TCGGAAACGATAGA | Stem loop | 6 | 88 |
| | 12 | ATAGCAAGTTTAAAT | | AATAGCAAGTTTAA | | CGCGGCACCGAGTC | 2 | | |
| | | AAGGCTAGTCCGTTAT | | ATAAGGCTAGTCCG | | GGTGC | | | |
| | | CAGCGTCTATCGGAA | | TTATCAGCGTcta | | | | | |
| | | ACGATAGACGCGGCA | | | | | | | |
| | | CCGAGTCGGTGC | | | | | | | |
| 4072 | L2_e6_ | GTTTAAGAGCTAGAA | 6590 | GTTTAAGAGCTAGA | 6742 | GGTGAAAGCCGGGA | Stem loop | 6 | 88 |
| | 13 | ATAGCAAGTTTAAAT | | AATAGCAAGTTTAA | | CGCGGCACCGAGTC | 2 | | |
| | | AAGGCTAGTCCGTTAT | | ATAAGGCTAGTCCG | | GGTGC | | | |
| | | CAGCGTCCCGGTGAA | | TTATCAGCGTccc | | | | | |
| | | AGCCGGGACGCGGCA | | | | | | | |
| | | CCGAGTCGGTGC | | | | | | | |
| 4073 | L2_e6_ | GTTTAAGAGCTAGAA | 6591 | GTTTAAGAGCTAGA | 6743 | TATGAAAATAGGGA | Stem loop | 6 | 88 |
| | 14 | ATAGCAAGTTTAAAT | | AATAGCAAGTTTAA | | CGCGGCACCGAGTC | 2 | | |
| | | AAGGCTAGTCCGTTAT | | ATAAGGCTAGTCCG | | GGTGC | | | |
| | | CAGCGTCCCTATGAA | | TTATCAGCGTccc | | | | | |
| | | AATAGGGACGCGGCA | | | | | | | |
| | | CCGAGTCGGTGC | | | | | | | |
| 4074 | L2_e6_ | GTTTAAGAGCTAGAA | 6592 | GTTTAAGAGCTAGA | 6744 | GCGGAAACGCTTGA | Stem loop | 6 | 88 |
| | 15 | ATAGCAAGTTTAAAT | | AATAGCAAGTTTAA | | CGCGGCACCGAGTC | 2 | | |
| | | AAGGCTAGTCCGTTAT | | ATAAGGCTAGTCCG | | GGTGC | | | |
| | | CAGCGTCAAGCGGAA | | TTATCAGCGTcaa | | | | | |
| | | ACGCTTGACGCGGCA | | | | | | | |
| | | CCGAGTCGGTGC | | | | | | | |
| 4075 | L2_e6_ | GTTTAAGAGCTAGAA | 6593 | GTTTAAGAGCTAGA | 6745 | GCGGAAACGCTCTA | Stem loop | 6 | 88 |
| | 16 | ATAGCAAGTTTAAAT | | AATAGCAAGTTTAA | | CGCGGCACCGAGTC | 2 | | |
| | | AAGGCTAGTCCGTTAT | | ATAAGGCTAGTCCG | | GGTGC | | | |
| | | CAGCGTAGGGCGGAA | | TTATCAGCGTagg | | | | | |
| | | ACGCTCTACGCGGCA | | | | | | | |
| | | CCGAGTCGGTGC | | | | | | | |
| 4076 | L2_e6_ | GTTTAAGAGCTAGAA | 6594 | GTTTAAGAGCTAGA | 6740 | CGGGAAACCGGGGA | Stem loop | 6 | 88 |
| | 17 | ATAGCAAGTTTAAAT | | AATAGCAAGTTTAA | | CGCGGCACCGAGTC | 2 | | |
| | | AAGGCTAGTCCGTTAT | | ATAAGGCTAGTCCG | | GGTGC | | | |
| | | CAGCGTCCTCGGGAA | | TTATCAGCGTcct | | | | | |
| | | ACCGGGGACGCGGCA | | | | | | | |
| | | CCGAGTCGGTGC | | | | | | | |
| 4077 | L2_e6_ | GTTTAAGAGCTAGAA | 6595 | GTTTAAGAGCTAGA | 6746 | ACGGAAACGTGGAA | Stem loop | 6 | 88 |
| | 18 | ATAGCAAGTTTAAAT | | AATAGCAAGTTTAA | | CGCGGCACCGAGTC | 2 | | |
| | | AAGGCTAGTCCGTTAT | | ATAAGGCTAGTCCG | | GGTGC | | | |
| | | CAGCGTTCCACGGAA | | TTATCAGCGTtcc | | | | | |
| | | ACGTGGAACGCGGCA | | | | | | | |
| | | CCGAGTCGGTGC | | | | | | | |
| 4078 | L2_e6_ | GTTTAAGAGCTAGAA | 6596 | GTTTAAGAGCTAGA | 6747 | ATCGAAAGATCCCA | Stem loop | 6 | 88 |
| | 19 | ATAGCAAGTTTAAAT | | AATAGCAAGTTTAA | | CGCGGCACCGAGTC | 2 | | |
| | | AAGGCTAGTCCGTTAT | | ATAAGGCTAGTCCG | | GGTGC | | | |
| | | CAGCGTGGGATCGAA | | TTATCAGCGTggg | | | | | |
| | | AGATCCCACGCGGCA | | | | | | | |
| | | CCGAGTCGGTGC | | | | | | | |
| 4079 | L2_e6_ | GTTTAAGAGCTAGAA | 6597 | GTTTAAGAGCTAGA | 6748 | CTTGAAAGAGGCCA | Stem loop | 6 | 88 |
| | 20 | ATAGCAAGTTTAAAT | | AATAGCAAGTTTAA | | CGCGGCACCGAGTC | 2 | | |
| | | AAGGCTAGTCCGTTAT | | ATAAGGCTAGTCCG | | GGTGC | | | |
| | | CAGCGTGGTCTTGAA | | TTATCAGCGTggt | | | | | |
| | | AGAGGCCACGCGGCA | | | | | | | |
| | | CCGAGTCGGTGC | | | | | | | |
| 4080 | L2_e6_ | GTTTAAGAGCTAGAA | 6598 | GTTTAAGAGCTAGA | 6749 | GACGAAAGTTCTCA | Stem loop | 6 | 88 |
| | 21 | ATAGCAAGTTTAAAT | | AATAGCAAGTTTAA | | CGCGGCACCGAGTC | 2 | | |
| | | AAGGCTAGTCCGTTAT | | ATAAGGCTAGTCCG | | GGTGC | | | |
| | | CAGCGTGAGGACGAA | | TTATCAGCGTgag | | | | | |
| | | AGTTCTCACGCGGCAC | | | | | | | |
| | | CGAGTCGGTGC | | | | | | | |
| 4081 | L2_e6_ | GTTTAAGAGCTAGAA | 6599 | GTTTAAGAGCTAGA | 6750 | GCAGAAATGCGGTA | Stem loop | 6 | 88 |
| | 22 | ATAGCAAGTTTAAAT | | AATAGCAAGTTTAA | | CGCGGCACCGAGTC | 2 | | |
| | | AAGGCTAGTCCGTTAT | | ATAAGGCTAGTCCG | | GGTGC | | | |
| | | CAGCGTGCCGCAGAA | | TTATCAGCGTgcc | | | | | |
| | | ATGCGGTACGCGGCA | | | | | | | |
| | | CCGAGTCGGTGC | | | | | | | |
| 4082 | L2_e6_ | GTTTAAGAGCTAGAA | 6600 | GTTTAAGAGCTAGA | 6751 | ACCGAAAGGTCTTA | Stem loop | 6 | 88 |
| | 23 | ATAGCAAGTTTAAAT | | AATAGCAAGTTTAA | | CGCGGCACCGAGTC | 2 | | |
| | | AAGGCTAGTCCGTTAT | | ATAAGGCTAGTCCG | | GGTGC | | | |
| | | CAGCGTAAGACCGAA | | TTATCAGCGTaag | | | | | |
| | | AGGTCTTACGCGGCA | | | | | | | |
| | | CCGAGTCGGTGC | | | | | | | |
| 4083 | L2_e6_ | GTTTAAGAGCTAGAA | 6601 | GTTTAAGAGCTAGA | 6752 | ACCGAAAGGTCCAA | Stem loop | 6 | 88 |
| | 24 | ATAGCAAGTTTAAAT | | AATAGCAAGTTTAA | | CGCGGCACCGAGTC | 2 | | |
| | | AAGGCTAGTCCGTTAT | | ATAAGGCTAGTCCG | | GGTGC | | | |
| | | CAGCGTTGGACCGAA | | TTATCAGCGTtgg | | | | | |
| | | AGGTCCAACGCGGCA | | | | | | | |
| | | CCGAGTCGGTGC | | | | | | | |
| 4084 | L2_e6_ | GTTTAAGAGCTAGAA | 6602 | GTTTAAGAGCTAGA | 6753 | GCTGAAAGGCGTGA | Stem loop | 6 | 88 |
| | 25 | ATAGCAAGTTTAAAT | | AATAGCAAGTTTAA | | CGCGGCACCGAGTC | 2 | | |
| | | AAGGCTAGTCCGTTAT | | ATAAGGCTAGTCCG | | GGTGC | | | |
| | | CAGCGTCACGCTGAA | | TTATCAGCGTcac | | | | | |
| | | AGGCGTGACGCGGCA | | | | | | | |
| | | CCGAGTCGGTGC | | | | | | | |
| 4085 | L2_e6_ | GTTTAAGAGCTAGAA | 6603 | GTTTAAGAGCTAGA | 6754 | CGAGAAATCGAGTA | Stem loop | 6 | 88 |
| | 26 | ATAGCAAGTTTAAAT | | AATAGCAAGTTTAA | | CGCGGCACCGAGTC | 2 | | |
| | | AAGGCTAGTCCGTTAT | | ATAAGGCTAGTCCG | | GGTGC | | | |
| | | CAGCGTACTCGAGAA | | TTATCAGCGTact | | | | | |
| | | ATCGAGTACGCGGCA | | | | | | | |
| | | CCGAGTCGGTGC | | | | | | | |
| 4086 | L2_e6 | GTTTAAGAGCTAGAA | 6604 | GTTTAAGAGCTAGA | 6755 | CGTGAAAACGGGGA | Stem loop | 6 | 88 |
| | 27 | ATAGCAAGTTTAAAT | | AATAGCAAGTTTAA | | CGCGGCACCGAGTC | 2 | | |
| | | AAGGCTAGTCCGTTAT | | ATAAGGCTAGTCCG | | GGTGC | | | |
| | | CAGCGTCCCCGTGAA | | TTATCAGCGTecc | | | | | |
| | | AACGGGGACGCGGCA | | | | | | | |
| | | CCGAGTCGGTGC | | | | | | | |
| 4087 | L2_e6_ | GTTTAAGAGCTAGAA | 6605 | GTTTAAGAGCTAGA | 6756 | GGAGAAATCCGGTA | Stem loop | 6 | 88 |
| | 28 | ATAGCAAGTTTAAAT | | AATAGCAAGTTTAA | | CGCGGCACCGAGTC | 2 | | |
| | | AAGGCTAGTCCGTTAT | | ATAAGGCTAGTCCG | | GGTGC | | | |
| | | CAGCGTACCGGAGAA | | TTATCAGCGTacc | | | | | |
| | | ATCCGGTACGCGGCA | | | | | | | |
| | | CCGAGTCGGTGC | | | | | | | |
| 4088 | L2_e6_ | GTTTAAGAGCTAGAA | 6606 | GTTTAAGAGCTAGA | 6757 | GAAGAAATTCCCAA | Stem loop | 6 | 88 |
| | 29 | ATAGCAAGTTTAAAT | | AATAGCAAGTTTAA | | CGCGGCACCGAGTC | 2 | | |
| | | AAGGCTAGTCCGTTAT | | ATAAGGCTAGTCCG | | GGTGC | | | |
| | | CAGCGTTGGGAAGAA | | TTATCAGCGTtgg | | | | | |
| | | ATTCCCAACGCGGCA | | | | | | | |
| | | CCGAGTCGGTGC | | | | | | | |
| 4089 | L2_e6_ | GTTTAAGAGCTAGAA | 6607 | GTTTAAGAGCTAGA | 6758 | GCGGAAACGCTAGA | Stem loop | 6 | 88 |
| | 30 | ATAGCAAGTTTAAAT | | AATAGCAAGTTTAA | | CGCGGCACCGAGTC | 2 | | |
| | | AAGGCTAGTCCGTTAT | | ATAAGGCTAGTCCG | | GGTGC | | | |
| | | CAGCGTTTGGCGGAA | | TTATCAGCGTttg | | | | | |
| | | ACGCTAGACGCGGCA | | | | | | | |
| | | CCGAGTCGGTGC | | | | | | | |
| 4090 | L2_e6_ | GTTTAAGAGCTAGAA | 6608 | GTTTAAGAGCTAGA | 6759 | TCAGAAATGAGTCA | Stem loop | 6 | 88 |
| | 31 | ATAGCAAGTTTAAAT | | AATAGCAAGTTTAA | | CGCGGCACCGAGTC | 2 | | |
| | | AAGGCTAGTCCGTTAT | | ATAAGGCTAGTCCG | | GGTGC | | | |
| | | CAGCGTGGCTCAGAA | | TTATCAGCGTggc | | | | | |
| | | ATGAGTCACGCGGCA | | | | | | | |
| | | CCGAGTCGGTGC | | | | | | | |
| 4091 | L2_e6_ | GTTTAAGAGCTAGAA | 6609 | GTTTAAGAGCTAGA | 6760 | CGAGAAATCGTGAA | Stem loop | 6 | 88 |
| | 32 | ATAGCAAGTTTAAAT | | AATAGCAAGTTTAA | | CGCGGCACCGAGTC | 2 | | |
| | | AAGGCTAGTCCGTTAT | | ATAAGGCTAGTCCG | | GGTGC | | | |
| | | CAGCGTTCACGAGAA | | TTATCAGCGTtca | | | | | |
| | | ATCGTGAACGCGGCA | | | | | | | |
| | | CCGAGTCGGTGC | | | | | | | |
| 4092 | L2_e6_ | GTTTAAGAGCTAGAA | 6610 | GTTTAAGAGCTAGA | 6761 | TACGAAAGTAAGGA | Stem loop | 6 | 88 |
| | 33 | ATAGCAAGTTTAAAT | | AATAGCAAGTTTAA | | CGCGGCACCGAGTC | 2 | | |
| | | AAGGCTAGTCCGTTAT | | ATAAGGCTAGTCCG | | GGTGC | | | |
| | | CAGCGTCCTTACGAA | | TTATCAGCGTcct | | | | | |
| | | AGTAAGGACGCGGCA | | | | | | | |
| | | CCGAGTCGGTGC | | | | | | | |
| 4093 | L2_e6_ | GTTTAAGAGCTAGAA | 6611 | GTTTAAGAGCTAGA | 6762 | GAGGAAACTCACCA | Stem loop | 6 | 88 |
| | 34 | ATAGCAAGTTTAAAT | | AATAGCAAGTTTAA | | CGCGGCACCGAGTC | 2 | | |
| | | AAGGCTAGTCCGTTAT | | ATAAGGCTAGTCCG | | GGTGC | | | |
| | | CAGCGTGGTGAGGAA | | TTATCAGCGTggt | | | | | |
| | | ACTCACCACGCGGCA | | | | | | | |
| | | CCGAGTCGGTGC | | | | | | | |
| 4094 | L2_e6_ | GTTTAAGAGCTAGAA | 6612 | GTTTAAGAGCTAGA | 6763 | CTGGAAACAGTGCA | Stem loop | 6 | 88 |
| | 35 | ATAGCAAGTTTAAAT | | AATAGCAAGTTTAA | | CGCGGCACCGAGTC | 2 | | |
| | | AAGGCTAGTCCGTTAT | | ATAAGGCTAGTCCG | | GGTGC | | | |
| | | CAGCGTGCACTGGAA | | TTATCAGCGTgca | | | | | |
| | | ACAGTGCACGCGGCA | | | | | | | |
| | | CCGAGTCGGTGC | | | | | | | |
| 4095 | L2_e6_ | GTTTAAGAGCTAGAA | 6613 | GTTTAAGAGCTAGA | 6764 | CCAGAAATGGAGCA | Stem loop | 6 | 88 |
| | 36 | ATAGCAAGTTTAAAT | | AATAGCAAGTTTAA | | CGCGGCACCGAGTC | 2 | | |
| | | AAGGCTAGTCCGTTAT | | ATAAGGCTAGTCCG | | GGTGC | | | |
| | | CAGCGTGCTCCAGAA | | TTATCAGCGTgct | | | | | |
| | | ATGGAGCACGCGGCA | | | | | | | |
| | | CCGAGTCGGTGC | | | | | | | |
| 4096 | L2_e6_ | GTTTAAGAGCTAGAA | 6614 | GTTTAAGAGCTAGA | 6765 | AGAGAAATCTCCTA | Stem loop | 6 | 88 |
| | 37 | ATAGCAAGTTTAAAT | | AATAGCAAGTTTAA | | CGCGGCACCGAGTC | 2 | | |
| | | AAGGCTAGTCCGTTAT | | ATAAGGCTAGTCCG | | GGTGC | | | |
| | | CAGCGTAGGAGAGAA | | TTATCAGCGTagg | | | | | |
| | | ATCTCCTACGCGGCAC | | | | | | | |
| | | CGAGTCGGTGC | | | | | | | |
| 4097 | L2_e6_ | GTTTAAGAGCTAGAA | 6615 | GTTTAAGAGCTAGA | 6766 | GCGGAAACGCTGTA | Stem loop | 6 | 88 |
| | 38 | ATAGCAAGTTTAAAT | | AATAGCAAGTTTAA | | CGCGGCACCGAGTC | 2 | | |
| | | AAGGCTAGTCCGTTAT | | ATAAGGCTAGTCCG | | GGTGC | | | |
| | | CAGCGTACAGCGGAA | | TTATCAGCGTaca | | | | | |
| | | ACGCTGTACGCGGCA | | | | | | | |
| | | CCGAGTCGGTGC | | | | | | | |
| 4098 | L2_e6_ | GTTTAAGAGCTAGAA | 6616 | GTTTAAGAGCTAGA | 6767 | GCGGAAACGCTACA | Stem loop | 6 | 88 |
| | 39 | ATAGCAAGTTTAAAT | | AATAGCAAGTTTAA | | CGCGGCACCGAGTC | 2 | | |
| | | AAGGCTAGTCCGTTAT | | ATAAGGCTAGTCCG | | GGTGC | | | |
| | | CAGCGTGTAGCGGAA | | TTATCAGCGTgta | | | | | |
| | | ACGCTACACGCGGCA | | | | | | | |
| | | CCGAGTCGGTGC | | | | | | | |
| 4099 | L2_e6_ | GTTTAAGAGCTAGAA | 6617 | GTTTAAGAGCTAGA | 6740 | CGGGAAACCGGGGA | Stem loop | 6 | 88 |
| | 40 | ATAGCAAGTTTAAAT | | AATAGCAAGTTTAA | | CGCGGCACCGAGTC | 2 | | |
| | | AAGGCTAGTCCGTTAT | | ATAAGGCTAGTCCG | | GGTGC | | | |
| | | CAGCGTCCCCGGGAA | | TTATCAGCGTccc | | | | | |
| | | ACCGGGGACGCGGCA | | | | | | | |
| | | CCGAGTCGGTGC | | | | | | | |
| 4100 | L2_e6_ | GTTTAAGAGCTAGAA | 6618 | GTTTAAGAGCTAGA | 6768 | CCTGAAAAGGATGA | Stem loop | 6 | 88 |
| | 41 | ATAGCAAGTTTAAAT | | AATAGCAAGTTTAA | | CGCGGCACCGAGTC | 2 | | |
| | | AAGGCTAGTCCGTTAT | | ATAAGGCTAGTCCG | | GGTGC | | | |
| | | CAGCGTCATCCTGAA | | TTATCAGCGTcat | | | | | |
| | | AAGGATGACGCGGCA | | | | | | | |
| | | CCGAGTCGGTGC | | | | | | | |
| 4101 | L2_e6_ | GTTTAAGAGCTAGAA | 6619 | GTTTAAGAGCTAGA | 6769 | TAGGAAACTAGGAA | Stem loop | 6 | 88 |
| | 42 | ATAGCAAGTTTAAAT | | AATAGCAAGTTTAA | | CGCGGCACCGAGTC | 2 | | |
| | | AAGGCTAGTCCGTTAT | | ATAAGGCTAGTCCG | | GGTGC | | | |
| | | CAGCGTTCCTAGGAA | | TTATCAGCGTtcc | | | | | |
| | | ACTAGGAACGCGGCA | | | | | | | |
| | | CCGAGTCGGTGC | | | | | | | |
| 4102 | L2_e6_ | GTTTAAGAGCTAGAA | 6620 | GTTTAAGAGCTAGA | 6770 | AGCGAAAGCTCGGA | Stem loop | 6 | 88 |
| | 43 | ATAGCAAGTTTAAAT | | AATAGCAAGTTTAA | | CGCGGCACCGAGTC | 2 | | |
| | | AAGGCTAGTCCGTTAT | | ATAAGGCTAGTCCG | | GGTGC | | | |
| | | CAGCGTCTGAGCGAA | | TTATCAGCGTctg | | | | | |
| | | AGCTCGGACGCGGCA | | | | | | | |
| | | CCGAGTCGGTGC | | | | | | | |
| 4103 | L2_e6_ | GTTTAAGAGCTAGAA | 6621 | GTTTAAGAGCTAGA | 6771 | TTCGAAAGGAGGGA | Stem loop | 6 | 88 |
| | 44 | ATAGCAAGTTTAAAT | | AATAGCAAGTTTAA | | CGCGGCACCGAGTC | 2 | | |
| | | AAGGCTAGTCCGTTAT | | ATAAGGCTAGTCCG | | GGTGC | | | |
| | | CAGCGTCCCTTCGAAA | | TTATCAGCGTccc | | | | | |
| | | GGAGGGACGCGGCAC | | | | | | | |
| | | CGAGTCGGTGC | | | | | | | |
| 4104 | L2_e6_ | GTTTAAGAGCTAGAA | 6622 | GTTTAAGAGCTAGA | 6772 | GCGGAAACGCGTGA | Stem loop | 6 | 88 |
| | 45 | ATAGCAAGTTTAAAT | | AATAGCAAGTTTAA | | CGCGGCACCGAGTC | 2 | | |
| | | AAGGCTAGTCCGTTAT | | ATAAGGCTAGTCCG | | GGTGC | | | |
| | | CAGCGTCACGCGGAA | | TTATCAGCGTcac | | | | | |
| | | ACGCGTGACGCGGCA | | | | | | | |
| | | CCGAGTCGGTGC | | | | | | | |
| 4105 | L2_e6_ | GTTTAAGAGCTAGAA | 6623 | GTTTAAGAGCTAGA | 6773 | CTGGAAACAGTGAA | Stem loop | 6 | 88 |
| | 46 | ATAGCAAGTTTAAAT | | AATAGCAAGTTTAA | | CGCGGCACCGAGTC | 2 | | |
| | | AAGGCTAGTCCGTTAT | | ATAAGGCTAGTCCG | | GGTGC | | | |
| | | CAGCGTTCGCTGGAA | | TTATCAGCGTtcg | | | | | |
| | | ACAGTGAACGCGGCA | | | | | | | |
| | | CCGAGTCGGTGC | | | | | | | |
| 4106 | L2_e6_ | GTTTAAGAGCTAGAA | 6624 | GTTTAAGAGCTAGA | 6774 | CTCGAAAGAGGCCA | Stem loop | 6 | 88 |
| | 47 | ATAGCAAGTTTAAAT | | AATAGCAAGTTTAA | | CGCGGCACCGAGTC | 2 | | |
| | | AAGGCTAGTCCGTTAT | | ATAAGGCTAGTCCG | | GGTGC | | | |
| | | CAGCGTGGTCTCGAA | | TTATCAGCGTggt | | | | | |
| | | AGAGGCCACGCGGCA | | | | | | | |
| | | CCGAGTCGGTGC | | | | | | | |
| 4107 | L2_e6_ | GTTTAAGAGCTAGAA | 6625 | GTTTAAGAGCTAGA | 6775 | GTAGAAATGCGGGA | Stem loop | 6 | 88 |
| | 48 | ATAGCAAGTTTAAAT | | AATAGCAAGTTTAA | | CGCGGCACCGAGTC | 2 | | |
| | | AAGGCTAGTCCGTTAT | | ATAAGGCTAGTCCG | | GGTGC | | | |
| | | CAGCGTTCCGTAGAA | | TTATCAGCGTtcc | | | | | |
| | | ATGCGGGACGCGGCA | | | | | | | |
| | | CCGAGTCGGTGC | | | | | | | |
| 4108 | L2_e6_ | GTTTAAGAGCTAGAA | 6626 | GTTTAAGAGCTAGA | 6776 | CCGGAAACGGTACA | Stem loop | 6 | 88 |
| | 49 | ATAGCAAGTTTAAAT | | AATAGCAAGTTTAA | | CGCGGCACCGAGTC | 2 | | |
| | | AAGGCTAGTCCGTTAT | | ATAAGGCTAGTCCG | | GGTGC | | | |
| | | CAGCGTGTACCGGAA | | TTATCAGCGTgta | | | | | |
| | | ACGGTACACGCGGCA | | | | | | | |
| | | CCGAGTCGGTGC | | | | | | | |
| 4109 | L2_e6_ | GTTTAAGAGCTAGAA | 6627 | GTTTAAGAGCTAGA | 6777 | CTCGAAAGGGACTA | Stem loop | 6 | 88 |
| | 50 | ATAGCAAGTTTAAAT | | AATAGCAAGTTTAA | | CGCGGCACCGAGTC | 2 | | |
| | | AAGGCTAGTCCGTTAT | | ATAAGGCTAGTCCG | | GGTGC | | | |
| | | CAGCGTAGTCTCGAA | | TTATCAGCGTagt | | | | | |
| | | AGGGACTACGCGGCA | | | | | | | |
| | | CCGAGTCGGTGC | | | | | | | |
| 4110 | L2_e6 | GTTTAAGAGCTAGAA | 6628 | GTTTAAGAGCTAGA | 6778 | CTTGAAAAAGGTCA | Stem loop | 6 | 88 |
| | 51 | ATAGCAAGTTTAAAT | | AATAGCAAGTTTAA | | CGCGGCACCGAGTC | 2 | | |
| | | AAGGCTAGTCCGTTAT | | ATAAGGCTAGTCCG | | GGTGC | | | |
| | | CAGCGTGGCCTTGAA | | TTATCAGCGTggc | | | | | |
| | | AAAGGTCACGCGGCA | | | | | | | |
| | | CCGAGTCGGTGC | | | | | | | |
| 4111 | L2_e6_ | GTTTAAGAGCTAGAA | 6629 | GTTTAAGAGCTAGA | 6779 | CCGGAAACGGGGCA | Stem loop | 6 | 88 |
| | 52 | ATAGCAAGTTTAAAT | | AATAGCAAGTTTAA | | CGCGGCACCGAGTC | 2 | | |
| | | AAGGCTAGTCCGTTAT | | ATAAGGCTAGTCCG | | GGTGC | | | |
| | | CAGCGTGCTCCGGAA | | TTATCAGCGTgct | | | | | |
| | | ACGGGGCACGCGGCA | | | | | | | |
| | | CCGAGTCGGTGC | | | | | | | |
| 4112 | L2_e6_ | GTTTAAGAGCTAGAA | 6630 | GTTTAAGAGCTAGA | 6780 | TCTGAAAAGGCAGA | Stem loop | 6 | 88 |
| | 53 | ATAGCAAGTTTAAAT | | AATAGCAAGTTTAA | | CGCGGCACCGAGTC | 2 | | |
| | | AAGGCTAGTCCGTTAT | | ATAAGGCTAGTCCG | | GGTGC | | | |
| | | CAGCGTCTGTCTGAAA | | TTATCAGCGTctg | | | | | |
| | | AGGCAGACGCGGCAC | | | | | | | |
| | | CGAGTCGGTGC | | | | | | | |
| 4113 | L2_e6_ | GTTTAAGAGCTAGAA | 6631 | GTTTAAGAGCTAGA | 6781 | CCTGAAAAGGCTCA | Stem loop | 6 | 88 |
| | 54 | ATAGCAAGTTTAAAT | | AATAGCAAGTTTAA | | CGCGGCACCGAGTC | 2 | | |
| | | AAGGCTAGTCCGTTAT | | ATAAGGCTAGTCCG | | GGTGC | | | |
| | | CAGCGTGAGCCTGAA | | TTATCAGCGTgag | | | | | |
| | | AAGGCTCACGCGGCA | | | | | | | |
| | | CCGAGTCGGTGC | | | | | | | |
| 4114 | L2_e6_ | GTTTAAGAGCTAGAA | 6632 | GTTTAAGAGCTAGA | 6782 | TAGGAAACTGGGCA | Stem loop | 6 | 88 |
| | 55 | ATAGCAAGTTTAAAT | | AATAGCAAGTTTAA | | CGCGGCACCGAGTC | 2 | | |
| | | AAGGCTAGTCCGTTAT | | ATAAGGCTAGTCCG | | GGTGC | | | |
| | | CAGCGTGCCTAGGAA | | TTATCAGCGTgcc | | | | | |
| | | ACTGGGCACGCGGCA | | | | | | | |
| | | CCGAGTCGGTGC | | | | | | | |
| 4115 | L2_e6_ | GTTTAAGAGCTAGAA | 6633 | GTTTAAGAGCTAGA | 6783 | GCCGAAAGGCTCAA | Stem loop | 6 | 88 |
| | 56 | ATAGCAAGTTTAAAT | | AATAGCAAGTTTAA | | CGCGGCACCGAGTC | 2 | | |
| | | AAGGCTAGTCCGTTAT | | ATAAGGCTAGTCCG | | GGTGC | | | |
| | | CAGCGTTGAGCCGAA | | TTATCAGCGTtga | | | | | |
| | | AGGCTCAACGCGGCA | | | | | | | |
| | | CCGAGTCGGTGC | | | | | | | |
| 4116 | L2_e6_ | GTTTAAGAGCTAGAA | 6634 | GTTTAAGAGCTAGA | 6784 | AGGGAAACCTGTTA | Stem loop | 6 | 88 |
| | 57 | ATAGCAAGTTTAAAT | | AATAGCAAGTTTAA | | CGCGGCACCGAGTC | 2 | | |
| | | AAGGCTAGTCCGTTAT | | ATAAGGCTAGTCCG | | GGTGC | | | |
| | | CAGCGTAGCAGGGAA | | TTATCAGCGTagc | | | | | |
| | | ACCTGTTACGCGGCAC | | | | | | | |
| | | CGAGTCGGTGC | | | | | | | |
| 4117 | L2_e6_ | GTTTAAGAGCTAGAA | 6635 | GTTTAAGAGCTAGA | 6785 | ACTGAAAAGTGTCA | Stem loop | 6 | 88 |
| | 58 | ATAGCAAGTTTAAAT | | AATAGCAAGTTTAA | | CGCGGCACCGAGTC | 2 | | |
| | | AAGGCTAGTCCGTTAT | | ATAAGGCTAGTCCG | | GGTGC | | | |
| | | CAGCGTGACACTGAA | | TTATCAGCGTgac | | | | | |
| | | AAGTGTCACGCGGCA | | | | | | | |
| | | CCGAGTCGGTGC | | | | | | | |
| 4118 | L2_e6_ | GTTTAAGAGCTAGAA | 6636 | GTTTAAGAGCTAGA | 6786 | TCAGAAATGAGGGA | Stem loop | 6 | 88 |
| | 59 | ATAGCAAGTTTAAAT | | AATAGCAAGTTTAA | | CGCGGCACCGAGTC | 2 | | |
| | | AAGGCTAGTCCGTTAT | | ATAAGGCTAGTCCG | | GGTGC | | | |
| | | CAGCGTCCCTCAGAA | | TTATCAGCGTccc | | | | | |
| | | ATGAGGGACGCGGCA | | | | | | | |
| | | CCGAGTCGGTGC | | | | | | | |
| 4119 | L2_e6_ | GTTTAAGAGCTAGAA | 6637 | GTTTAAGAGCTAGA | 6787 | TTCGAAAGAACCTA | Stem loop | 6 | 88 |
| | 60 | ATAGCAAGTTTAAAT | | AATAGCAAGTTTAA | | CGCGGCACCGAGTC | 2 | | |
| | | AAGGCTAGTCCGTTAT | | ATAAGGCTAGTCCG | | GGTGC | | | |
| | | CAGCGTGGGTTCGAA | | TTATCAGCGTggg | | | | | |
| | | AGAACCTACGCGGCA | | | | | | | |
| | | CCGAGTCGGTGC | | | | | | | |
| 4120 | L2_e6_ | GTTTAAGAGCTAGAA | 6638 | GTTTAAGAGCTAGA | 6788 | TCGGAAACGAAACA | Stem loop | 6 | 88 |
| | 61 | ATAGCAAGTTTAAAT | | AATAGCAAGTTTAA | | CGCGGCACCGAGTC | 2 | | |
| | | AAGGCTAGTCCGTTAT | | ATAAGGCTAGTCCG | | GGTGC | | | |
| | | CAGCGTGTTTCGGAA | | TTATCAGCGTgtt | | | | | |
| | | ACGAAACACGCGGCA | | | | | | | |
| | | CCGAGTCGGTGC | | | | | | | |
| 4121 | L2_e6_ | GTTTAAGAGCTAGAA | 6639 | GTTTAAGAGCTAGA | 6789 | TCCGAAAGGAAGAA | Stem loop | 6 | 88 |
| | 62 | ATAGCAAGTTTAAAT | | AATAGCAAGTTTAA | | CGCGGCACCGAGTC | 2 | | |
| | | AAGGCTAGTCCGTTAT | | ATAAGGCTAGTCCG | | GGTGC | | | |
| | | CAGCGTTCTTCCGAAA | | TTATCAGCGTtct | | | | | |
| | | GGAAGAACGCGGCAC | | | | | | | |
| | | CGAGTCGGTGC | | | | | | | |
| 4122 | L2_e6_ | GTTTAAGAGCTAGAA | 6640 | GTTTAAGAGCTAGA | 6790 | TCCGAAAGGGGATA | Stem loop | 6 | 88 |
| | 63 | ATAGCAAGTTTAAAT | | AATAGCAAGTTTAA | | CGCGGCACCGAGTC | 2 | | |
| | | AAGGCTAGTCCGTTAT | | ATAAGGCTAGTCCG | | GGTGC | | | |
| | | CAGCGTATCTCCGAA | | TTATCAGCGTatc | | | | | |
| | | AGGGGATACGCGGCA | | | | | | | |
| | | CCGAGTCGGTGC | | | | | | | |
| 4123 | L2_e6_ | GTTTAAGAGCTAGAA | 6641 | GTTTAAGAGCTAGA | 6791 | CACGAAAGTGTGTA | Stem loop | 6 | 88 |
| | 64 | ATAGCAAGTTTAAAT | | AATAGCAAGTTTAA | | CGCGGCACCGAGTC | 2 | | |
| | | AAGGCTAGTCCGTTAT | | ATAAGGCTAGTCCG | | GGTGC | | | |
| | | CAGCGTACACACGAA | | TTATCAGCGTaca | | | | | |
| | | AGTGTGTACGCGGCA | | | | | | | |
| | | CCGAGTCGGTGC | | | | | | | |
| 4124 | L2_e6_ | GTTTAAGAGCTAGAA | 6642 | GTTTAAGAGCTAGA | 6792 | TTTGAAAAAAGCCA | Stem loop | 6 | 88 |
| | 65 | ATAGCAAGTTTAAAT | | AATAGCAAGTTTAA | | CGCGGCACCGAGTC | 2 | | |
| | | AAGGCTAGTCCGTTAT | | ATAAGGCTAGTCCG | | GGTGC | | | |
| | | CAGCGTGGCTTTGAA | | TTATCAGCGTggc | | | | | |
| | | AAAAGCCACGCGGCA | | | | | | | |
| | | CCGAGTCGGTGC | | | | | | | |
| 4125 | L2_e6_ | GTTTAAGAGCTAGAA | 6643 | GTTTAAGAGCTAGA | 6793 | GCCGAAAGGCTTTA | Stem loop | 6 | 88 |
| | 66 | ATAGCAAGTTTAAAT | | AATAGCAAGTTTAA | | CGCGGCACCGAGTC | 2 | | |
| | | AAGGCTAGTCCGTTAT | | ATAAGGCTAGTCCG | | GGTGC | | | |
| | | CAGCGTAGAGCCGAA | | TTATCAGCGTaga | | | | | |
| | | AGGCTTTACGCGGCA | | | | | | | |
| | | CCGAGTCGGTGC | | | | | | | |
| 4126 | L2_e6_ | GTTTAAGAGCTAGAA | 6644 | GTTTAAGAGCTAGA | 6794 | CCAGAAATGGACCA | Stem loop | 6 | 88 |
| | 67 | ATAGCAAGTTTAAAT | | AATAGCAAGTTTAA | | CGCGGCACCGAGTC | 2 | | |
| | | AAGGCTAGTCCGTTAT | | ATAAGGCTAGTCCG | | GGTGC | | | |
| | | CAGCGTGGTCCAGAA | | TTATCAGCGTggt | | | | | |
| | | ATGGACCACGCGGCA | | | | | | | |
| | | CCGAGTCGGTGC | | | | | | | |
| 4127 | L2_e6_ | GTTTAAGAGCTAGAA | 6645 | GTTTAAGAGCTAGA | 6795 | CTAGAAATAGGCAA | Stem loop | 6 | 88 |
| | 68 | ATAGCAAGTTTAAAT | | AATAGCAAGTTTAA | | CGCGGCACCGAGTC | 2 | | |
| | | AAGGCTAGTCCGTTAT | | ATAAGGCTAGTCCG | | GGTGC | | | |
| | | CAGCGTTGCCTAGAA | | TTATCAGCGTtgc | | | | | |
| | | ATAGGCAACGCGGCA | | | | | | | |
| | | CCGAGTCGGTGC | | | | | | | |
| 4128 | L2_e6_ | GTTTAAGAGCTAGAA | 6646 | GTTTAAGAGCTAGA | 6796 | AACGAAAGTTGCTA | Stem loop | 6 | 88 |
| | 69 | ATAGCAAGTTTAAAT | | AATAGCAAGTTTAA | | CGCGGCACCGAGTC | 2 | | |
| | | AAGGCTAGTCCGTTAT | | ATAAGGCTAGTCCG | | GGTGC | | | |
| | | CAGCGTAGCAACGAA | | TTATCAGCGTagc | | | | | |
| | | AGTTGCTACGCGGCA | | | | | | | |
| | | CCGAGTCGGTGC | | | | | | | |
| 4129 | L2_e6_ | GTTTAAGAGCTAGAA | 6647 | GTTTAAGAGCTAGA | 6797 | TCAGAAATGGCCAA | Stem loop | 6 | 88 |
| | 70 | ATAGCAAGTTTAAAT | | AATAGCAAGTTTAA | | CGCGGCACCGAGTC | 2 | | |
| | | AAGGCTAGTCCGTTAT | | ATAAGGCTAGTCCG | | GGTGC | | | |
| | | CAGCGTTGGTCAGAA | | TTATCAGCGTtgg | | | | | |
| | | ATGGCCAACGCGGCA | | | | | | | |
| | | CCGAGTCGGTGC | | | | | | | |
| 4130 | L2_e6_ | GTTTAAGAGCTAGAA | 6648 | GTTTAAGAGCTAGA | 6798 | AGGGAAACTTTGGA | Stem loop | 6 | 88 |
| | 71 | ATAGCAAGTTTAAAT | | AATAGCAAGTTTAA | | CGCGGCACCGAGTC | 2 | | |
| | | AAGGCTAGTCCGTTAT | | ATAAGGCTAGTCCG | | GGTGC | | | |
| | | CAGCGTCCAAGGGAA | | TTATCAGCGTcca | | | | | |
| | | ACTTTGGACGCGGCA | | | | | | | |
| | | CCGAGTCGGTGC | | | | | | | |
| 4131 | L2_e6_ | GTTTAAGAGCTAGAA | 6649 | GTTTAAGAGCTAGA | 6799 | CACGAAAGTGGAAA | Stem loop | 6 | 88 |
| | 72 | ATAGCAAGTTTAAAT | | AATAGCAAGTTTAA | | CGCGGCACCGAGTC | 2 | | |
| | | AAGGCTAGTCCGTTAT | | ATAAGGCTAGTCCG | | GGTGC | | | |
| | | CAGCGTTTCCACGAA | | TTATCAGCGTttc | | | | | |
| | | AGTGGAAACGCGGCA | | | | | | | |
| | | CCGAGTCGGTGC | | | | | | | |
| 4132 | L2_e6_ | GTTTAAGAGCTAGAA | 6650 | GTTTAAGAGCTAGA | 6800 | CGGGAAACCGCGCA | Stem loop | 6 | 88 |
| | 73 | ATAGCAAGTTTAAAT | | AATAGCAAGTTTAA | | CGCGGCACCGAGTC | 2 | | |
| | | AAGGCTAGTCCGTTAT | | ATAAGGCTAGTCCG | | GGTGC | | | |
| | | CAGCGTGCGCGGGAA | | TTATCAGCGTgcg | | | | | |
| | | ACCGCGCACGCGGCA | | | | | | | |
| | | CCGAGTCGGTGC | | | | | | | |
| 4133 | L2_e6_ | GTTTAAGAGCTAGAA | 6651 | GTTTAAGAGCTAGA | 6801 | TGAGAAATTAGGGA | Stem loop | 6 | 88 |
| | 74 | ATAGCAAGTTTAAAT | | AATAGCAAGTTTAA | | CGCGGCACCGAGTC | 2 | | |
| | | AAGGCTAGTCCGTTAT | | ATAAGGCTAGTCCG | | GGTGC | | | |
| | | CAGCGTCCCTGAGAA | | TTATCAGCGTccc | | | | | |
| | | ATTAGGGACGCGGCA | | | | | | | |
| | | CCGAGTCGGTGC | | | | | | | |
| 4134 | L2_e6_ | GTTTAAGAGCTAGAA | 6652 | GTTTAAGAGCTAGA | 6802 | GTGGAAACACGTGA | Stem loop | 6 | 88 |
| | 75 | ATAGCAAGTTTAAAT | | AATAGCAAGTTTAA | | CGCGGCACCGAGTC | 2 | | |
| | | AAGGCTAGTCCGTTAT | | ATAAGGCTAGTCCG | | GGTGC | | | |
| | | CAGCGTCACGTGGAA | | TTATCAGCGTcac | | | | | |
| | | ACACGTGACGCGGCA | | | | | | | |
| | | CCGAGTCGGTGC | | | | | | | |
| 4135 | L2_e6_ | GTTTAAGAGCTAGAA | 6653 | GTTTAAGAGCTAGA | 6803 | CTCGAAAGAGGGCA | Stem loop | 6 | 88 |
| | 76 | ATAGCAAGTTTAAAT | | AATAGCAAGTTTAA | | CGCGGCACCGAGTC | 2 | | |
| | | AAGGCTAGTCCGTTAT | | ATAAGGCTAGTCCG | | GGTGC | | | |
| | | CAGCGTGCCCTCGAA | | TTATCAGCGTgcc | | | | | |
| | | AGAGGGCACGCGGCA | | | | | | | |
| | | CCGAGTCGGTGC | | | | | | | |
| 4136 | L2_e6_ | GTTTAAGAGCTAGAA | 6654 | GTTTAAGAGCTAGA | 6804 | GGTGAAAGCCTGCA | Stem loop | 6 | 88 |
| | 77 | ATAGCAAGTTTAAAT | | AATAGCAAGTTTAA | | CGCGGCACCGAGTC | 2 | | |
| | | AAGGCTAGTCCGTTAT | | ATAAGGCTAGTCCG | | GGTGC | | | |
| | | CAGCGTGCGGGTGAA | | TTATCAGCGTgcg | | | | | |
| | | AGCCTGCACGCGGCA | | | | | | | |
| | | CCGAGTCGGTGC | | | | | | | |
| 4137 | L2_e6_ | GTTTAAGAGCTAGAA | 6655 | GTTTAAGAGCTAGA | 6805 | GCAGAAATGCGCTA | Stem loop | 6 | 88 |
| | 78 | ATAGCAAGTTTAAAT | | AATAGCAAGTTTAA | | CGCGGCACCGAGTC | 2 | | |
| | | AAGGCTAGTCCGTTAT | | ATAAGGCTAGTCCG | | GGTGC | | | |
| | | CAGCGTAGCGCAGAA | | TTATCAGCGTagc | | | | | |
| | | ATGCGCTACGCGGCA | | | | | | | |
| | | CCGAGTCGGTGC | | | | | | | |
| 4138 | L2_e6_ | GTTTAAGAGCTAGAA | 6656 | GTTTAAGAGCTAGA | 6806 | GGGGAAACCCTGGA | Stem loop | 6 | 88 |
| | 79 | ATAGCAAGTTTAAAT | | AATAGCAAGTTTAA | | CGCGGCACCGAGTC | 2 | | |
| | | AAGGCTAGTCCGTTAT | | ATAAGGCTAGTCCG | | GGTGC | | | |
| | | CAGCGTCCAGGGGAA | | TTATCAGCGTcca | | | | | |
| | | ACCCTGGACGCGGCA | | | | | | | |
| | | CCGAGTCGGTGC | | | | | | | |
| 4139 | L2_e6_ | GTTTAAGAGCTAGAA | 6657 | GTTTAAGAGCTAGA | 6807 | CGAGAAATTGGCTA | Stem loop | 6 | 88 |
| | 80 | ATAGCAAGTTTAAAT | | AATAGCAAGTTTAA | | CGCGGCACCGAGTC | 2 | | |
| | | AAGGCTAGTCCGTTAT | | ATAAGGCTAGTCCG | | GGTGC | | | |
| | | CAGCGTAGCCGAGAA | | TTATCAGCGTagc | | | | | |
| | | ATTGGCTACGCGGCA | | | | | | | |
| | | CCGAGTCGGTGC | | | | | | | |
| 4140 | L2_e6_ | GTTTAAGAGCTAGAA | 6658 | GTTTAAGAGCTAGA | 6808 | GCGGAAACGCGTAA | Stem loop | 6 | 88 |
| | 81 | ATAGCAAGTTTAAAT | | AATAGCAAGTTTAA | | CGCGGCACCGAGTC | 2 | | |
| | | AAGGCTAGTCCGTTAT | | ATAAGGCTAGTCCG | | GGTGC | | | |
| | | CAGCGTTACGCGGAA | | TTATCAGCGTtac | | | | | |
| | | ACGCGTAACGCGGCA | | | | | | | |
| | | CCGAGTCGGTGC | | | | | | | |
| 4141 | L2_e6_ | GTTTAAGAGCTAGAA | 6659 | GTTTAAGAGCTAGA | 6809 | CTCGAAAGGGTGTA | Stem loop | 6 | 88 |
| | 82 | ATAGCAAGTTTAAAT | | AATAGCAAGTTTAA | | CGCGGCACCGAGTC | 2 | | |
| | | AAGGCTAGTCCGTTAT | | ATAAGGCTAGTCCG | | GGTGC | | | |
| | | CAGCGTACACTCGAA | | TTATCAGCGTaca | | | | | |
| | | AGGGTGTACGCGGCA | | | | | | | |
| | | CCGAGTCGGTGC | | | | | | | |
| 4142 | L2_e6_ | GTTTAAGAGCTAGAA | 6660 | GTTTAAGAGCTAGA | 6810 | ACCGAAAGGTGCTA | Stem loop | 6 | 88 |
| | 83 | ATAGCAAGTTTAAAT | | AATAGCAAGTTTAA | | CGCGGCACCGAGTC | 2 | | |
| | | AAGGCTAGTCCGTTAT | | ATAAGGCTAGTCCG | | GGTGC | | | |
| | | CAGCGTAGTACCGAA | | TTATCAGCGTagt | | | | | |
| | | AGGTGCTACGCGGCA | | | | | | | |
| | | CCGAGTCGGTGC | | | | | | | |
| 4143 | L2_e6_ | GTTTAAGAGCTAGAA | 6661 | GTTTAAGAGCTAGA | 6811 | GGGGAAACCCCCAA | Stem loop | 6 | 88 |
| | 84 | ATAGCAAGTTTAAAT | | AATAGCAAGTTTAA | | CGCGGCACCGAGTC | 2 | | |
| | | AAGGCTAGTCCGTTAT | | ATAAGGCTAGTCCG | | GGTGC | | | |
| | | CAGCGTTGGGGGGAA | | TTATCAGCGTtgg | | | | | |
| | | ACCCCCAACGCGGCA | | | | | | | |
| | | CCGAGTCGGTGC | | | | | | | |
| 4144 | L2_e6_ | GTTTAAGAGCTAGAA | 6662 | GTTTAAGAGCTAGA | 6812 | GGTGAAAGCCACCA | Stem loop | 6 | 88 |
| | 85 | ATAGCAAGTTTAAAT | | AATAGCAAGTTTAA | | CGCGGCACCGAGTC | 2 | | |
| | | AAGGCTAGTCCGTTAT | | ATAAGGCTAGTCCG | | GGTGC | | | |
| | | CAGCGTGGTGGTGAA | | TTATCAGCGTggt | | | | | |
| | | AGCCACCACGCGGCA | | | | | | | |
| | | CCGAGTCGGTGC | | | | | | | |
| 4145 | L2_e6 | GTTTAAGAGCTAGAA | 6663 | GTTTAAGAGCTAGA | 6813 | GAGGAAACTCTCCA | Stem loop | 6 | 88 |
| | 86 | ATAGCAAGTTTAAAT | | AATAGCAAGTTTAA | | CGCGGCACCGAGTC | 2 | | |
| | | AAGGCTAGTCCGTTAT | | ATAAGGCTAGTCCG | | GGTGC | | | |
| | | CAGCGTGGGGAGGAA | | TTATCAGCGTggg | | | | | |
| | | ACTCTCCACGCGGCAC | | | | | | | |
| | | CGAGTCGGTGC | | | | | | | |
| 4146 | L2_e6 | GTTTAAGAGCTAGAA | 6664 | GTTTAAGAGCTAGA | 6814 | TGGGAAACCAAACA | Stem loop | 6 | 88 |
| | 87 | ATAGCAAGTTTAAAT | | AATAGCAAGTTTAA | | CGCGGCACCGAGTC | 2 | | |
| | | AAGGCTAGTCCGTTAT | | ATAAGGCTAGTCCG | | GGTGC | | | |
| | | CAGCGTGTTTGGGAA | | TTATCAGCGTgtt | | | | | |
| | | ACCAAACACGCGGCA | | | | | | | |
| | | CCGAGTCGGTGC | | | | | | | |
| 4147 | L2_e6_ | GTTTAAGAGCTAGAA | 6665 | GTTTAAGAGCTAGA | 6815 | AACGAAAGTTGGAA | Stem loop | 6 | 88 |
| | 88 | ATAGCAAGTTTAAAT | | AATAGCAAGTTTAA | | CGCGGCACCGAGTC | 2 | | |
| | | AAGGCTAGTCCGTTAT | | ATAAGGCTAGTCCG | | GGTGC | | | |
| | | CAGCGTTCCAACGAA | | TTATCAGCGTtec | | | | | |
| | | AGTTGGAACGCGGCA | | | | | | | |
| | | CCGAGTCGGTGC | | | | | | | |
| 4148 | L2_e6_ | GTTTAAGAGCTAGAA | 6666 | GTTTAAGAGCTAGA | 6816 | CGCGAAAGCGCGTA | Stem loop | 6 | 88 |
| | 89 | ATAGCAAGTTTAAAT | | AATAGCAAGTTTAA | | CGCGGCACCGAGTC | 2 | | |
| | | AAGGCTAGTCCGTTAT | | ATAAGGCTAGTCCG | | GGTGC | | | |
| | | CAGCGTGCGCGCGAA | | TTATCAGCGTgcg | | | | | |
| | | AGCGCGTACGCGGCA | | | | | | | |
| | | CCGAGTCGGTGC | | | | | | | |
| 4149 | L2_e6_ | GTTTAAGAGCTAGAA | 6667 | GTTTAAGAGCTAGA | 6817 | GTCGAAAGGCAGCA | Stem loop | 6 | 88 |
| | 90 | ATAGCAAGTTTAAAT | | AATAGCAAGTTTAA | | CGCGGCACCGAGTC | 2 | | |
| | | AAGGCTAGTCCGTTAT | | ATAAGGCTAGTCCG | | GGTGC | | | |
| | | CAGCGTGCTGTCGAA | | TTATCAGCGTgct | | | | | |
| | | AGGCAGCACGCGGCA | | | | | | | |
| | | CCGAGTCGGTGC | | | | | | | |
| 4150 | L2_e6_ | GTTTAAGAGCTAGAA | 6668 | GTTTAAGAGCTAGA | 6818 | GTCGAAAGACGAGA | Stem loop | 6 | 88 |
| | 91 | ATAGCAAGTTTAAAT | | AATAGCAAGTTTAA | | CGCGGCACCGAGTC | 2 | | |
| | | AAGGCTAGTCCGTTAT | | ATAAGGCTAGTCCG | | GGTGC | | | |
| | | CAGCGTCTCGTCGAA | | TTATCAGCGTctc | | | | | |
| | | AGACGAGACGCGGCA | | | | | | | |
| | | CCGAGTCGGTGC | | | | | | | |
| 4151 | L2_e6_ | GTTTAAGAGCTAGAA | 6669 | GTTTAAGAGCTAGA | 6819 | CAGGAAACTGGTCA | Stem loop | 6 | 88 |
| | 92 | ATAGCAAGTTTAAAT | | AATAGCAAGTTTAA | | CGCGGCACCGAGTC | 2 | | |
| | | AAGGCTAGTCCGTTAT | | ATAAGGCTAGTCCG | | GGTGC | | | |
| | | CAGCGTGACCAGGAA | | TTATCAGCGTgac | | | | | |
| | | ACTGGTCACGCGGCA | | | | | | | |
| | | CCGAGTCGGTGC | | | | | | | |
| 4152 | L2_e6_ | GTTTAAGAGCTAGAA | 6670 | GTTTAAGAGCTAGA | 6820 | GTGGAAACACGCCA | Stem loop | 6 | 88 |
| | 93 | ATAGCAAGTTTAAAT | | AATAGCAAGTTTAA | | CGCGGCACCGAGTC | 2 | | |
| | | AAGGCTAGTCCGTTAT | | ATAAGGCTAGTCCG | | GGTGC | | | |
| | | CAGCGTGGTGTGGAA | | TTATCAGCGTggt | | | | | |
| | | ACACGCCACGCGGCA | | | | | | | |
| | | CCGAGTCGGTGC | | | | | | | |
| 4153 | L2_e6_ | GTTTAAGAGCTAGAA | 6671 | GTTTAAGAGCTAGA | 6821 | GCCGAAAGGCAAAA | Stem loop | 6 | 88 |
| | 94 | ATAGCAAGTTTAAAT | | AATAGCAAGTTTAA | | CGCGGCACCGAGTC | 2 | | |
| | | AAGGCTAGTCCGTTAT | | ATAAGGCTAGTCCG | | GGTGC | | | |
| | | CAGCGTTTTGCCGAAA | | TTATCAGCGTttt | | | | | |
| | | GGCAAAACGCGGCAC | | | | | | | |
| | | CGAGTCGGTGC | | | | | | | |
| 4154 | L2_e6_ | GTTTAAGAGCTAGAA | 6672 | GTTTAAGAGCTAGA | 6822 | GACGAAAGTCACTA | Stem loop | 6 | 88 |
| | 95 | ATAGCAAGTTTAAAT | | AATAGCAAGTTTAA | | CGCGGCACCGAGTC | 2 | | |
| | | AAGGCTAGTCCGTTAT | | ATAAGGCTAGTCCG | | GGTGC | | | |
| | | CAGCGTAGTGACGAA | | TTATCAGCGTagt | | | | | |
| | | AGTCACTACGCGGCA | | | | | | | |
| | | CCGAGTCGGTGC | | | | | | | |
| 4155 | L2_e6_ | GTTTAAGAGCTAGAA | 6673 | GTTTAAGAGCTAGA | 6823 | AAGGAAACTTAGGA | Stem loop | 6 | 88 |
| | 96 | ATAGCAAGTTTAAAT | | AATAGCAAGTTTAA | | CGCGGCACCGAGTC | 2 | | |
| | | AAGGCTAGTCCGTTAT | | ATAAGGCTAGTCCG | | GGTGC | | | |
| | | CAGCGTCCTAAGGAA | | TTATCAGCGTcct | | | | | |
| | | ACTTAGGACGCGGCA | | | | | | | |
| | | CCGAGTCGGTGC | | | | | | | |
| 4156 | L2_e6_ | GTTTAAGAGCTAGAA | 6674 | GTTTAAGAGCTAGA | 6824 | CTAGAAATAGGCTA | Stem loop | 6 | 88 |
| | 97 | ATAGCAAGTTTAAAT | | AATAGCAAGTTTAA | | CGCGGCACCGAGTC | 2 | | |
| | | AAGGCTAGTCCGTTAT | | ATAAGGCTAGTCCG | | GGTGC | | | |
| | | CAGCGTGGCCTAGAA | | TTATCAGCGTggc | | | | | |
| | | ATAGGCTACGCGGCA | | | | | | | |
| | | CCGAGTCGGTGC | | | | | | | |
| 4157 | L2_e6_ | GTTTAAGAGCTAGAA | 6675 | GTTTAAGAGCTAGA | 6825 | AGCGAAAGCTCATA | Stem loop | 6 | 88 |
| | 98 | ATAGCAAGTTTAAAT | | AATAGCAAGTTTAA | | CGCGGCACCGAGTC | 2 | | |
| | | AAGGCTAGTCCGTTAT | | ATAAGGCTAGTCCG | | GGTGC | | | |
| | | CAGCGTATGAGCGAA | | TTATCAGCGTatg | | | | | |
| | | AGCTCATACGCGGCA | | | | | | | |
| | | CCGAGTCGGTGC | | | | | | | |
| 4158 | L2_e6_ | GTTTAAGAGCTAGAA | 6676 | GTTTAAGAGCTAGA | 6826 | ATCGAAAGATCCAA | Stem loop | 6 | 88 |
| | 99 | ATAGCAAGTTTAAAT | | AATAGCAAGTTTAA | | CGCGGCACCGAGTC | 2 | | |
| | | AAGGCTAGTCCGTTAT | | ATAAGGCTAGTCCG | | GGTGC | | | |
| | | CAGCGTTGGATCGAA | | TTATCAGCGTtgg | | | | | |
| | | AGATCCAACGCGGCA | | | | | | | |
| | | CCGAGTCGGTGC | | | | | | | |
| 4159 | L2_e6_ | GTTTAAGAGCTAGAA | 6677 | GTTTAAGAGCTAGA | 6827 | CAAGAAATTGCCCA | Stem loop | 6 | 88 |
| | 100 | ATAGCAAGTTTAAAT | | AATAGCAAGTTTAA | | CGCGGCACCGAGTC | 2 | | |
| | | AAGGCTAGTCCGTTAT | | ATAAGGCTAGTCCG | | GGTGC | | | |
| | | CAGCGTGGGCAAGAA | | TTATCAGCGTggg | | | | | |
| | | ATTGCCCACGCGGCA | | | | | | | |
| | | CCGAGTCGGTGC | | | | | | | |
| 4160 | L2_e7_ | GTTTAAGAGCTAGAA | 6678 | GTTTAAGAGCTAGA | 6828 | CGCGAAAGCGACGA | Stem loop | 7 | 90 |
| | 1 | ATAGCAAGTTTAAAT | | AATAGCAAGTTTAA | | ACGCGGCACCGAGT | 2 | | |
| | | AAGGCTAGTCCGTTAT | | ATAAGGCTAGTCCG | | CGGTGC | | | |
| | | CAGCGTTCGTCGCGA | | TTATCAGCGTtcgt | | | | | |
| | | AAGCGACGAACGCGG | | | | | | | |
| | | CACCGAGTCGGTGC | | | | | | | |
| 4161 | L2_e7_ | GTTTAAGAGCTAGAA | 6679 | GTTTAAGAGCTAGA | 6829 | CGCGAAAGCGCACT | Stem loop | 7 | 90 |
| | 2 | ATAGCAAGTTTAAAT | | AATAGCAAGTTTAA | | ACGCGGCACCGAGT | 2 | | |
| | | AAGGCTAGTCCGTTAT | | ATAAGGCTAGTCCG | | CGGTGC | | | |
| | | CAGCGTGGTGCGCGA | | TTATCAGCGTggtg | | | | | |
| | | AAGCGCACTACGCGG | | | | | | | |
| | | CACCGAGTCGGTGC | | | | | | | |
| 4162 | L2_e7_ | GTTTAAGAGCTAGAA | 6680 | GTTTAAGAGCTAGA | 6830 | CGGGAAACTGTGTC | Stem loop | 7 | 90 |
| | 3 | ATAGCAAGTTTAAAT | | AATAGCAAGTTTAA | | ACGCGGCACCGAGT | 2 | | |
| | | AAGGCTAGTCCGTTAT | | ATAAGGCTAGTCCG | | CGGTGC | | | |
| | | CAGCGTGGCACGGGA | | TTATCAGCGTggca | | | | | |
| | | AACTGTGTCACGCGG | | | | | | | |
| | | CACCGAGTCGGTGC | | | | | | | |
| 4163 | L2_e7_ | GTTTAAGAGCTAGAA | 6681 | GTTTAAGAGCTAGA | 6831 | GGGGAAACCCTTAG | Stem loop | 7 | 90 |
| | 4 | ATAGCAAGTTTAAAT | | AATAGCAAGTTTAA | | ACGCGGCACCGAGT | 2 | | |
| | | AAGGCTAGTCCGTTAT | | ATAAGGCTAGTCCG | | CGGTGC | | | |
| | | CAGCGTCTAAGGGGA | | TTATCAGCGTctaa | | | | | |
| | | AACCCTTAGACGCGG | | | | | | | |
| | | CACCGAGTCGGTGC | | | | | | | |
| 4164 | L2_e7_ | GTTTAAGAGCTAGAA | 6682 | GTTTAAGAGCTAGA | 6832 | TCGGAAACGAGTCT | Stem loop | 7 | 90 |
| | 5 | ATAGCAAGTTTAAAT | | AATAGCAAGTTTAA | | ACGCGGCACCGAGT | 2 | | |
| | | AAGGCTAGTCCGTTAT | | ATAAGGCTAGTCCG | | CGGTGC | | | |
| | | CAGCGTAGACTCGGA | | TTATCAGCGTagac | | | | | |
| | | AACGAGTCTACGCGG | | | | | | | |
| | | CACCGAGTCGGTGC | | | | | | | |
| 4165 | L2_e7_ | GTTTAAGAGCTAGAA | 6683 | GTTTAAGAGCTAGA | 6833 | GACGAAAGTCGGCG | Stem loop | 7 | 90 |
| | 6 | ATAGCAAGTTTAAAT | | AATAGCAAGTTTAA | | ACGCGGCACCGAGT | 2 | | |
| | | AAGGCTAGTCCGTTAT | | ATAAGGCTAGTCCG | | CGGTGC | | | |
| | | CAGCGTCGCTGACGA | | TTATCAGCGTcgct | | | | | |
| | | AAGTCGGCGACGCGG | | | | | | | |
| | | CACCGAGTCGGTGC | | | | | | | |
| 4166 | L2_e7_ | GTTTAAGAGCTAGAA | 6684 | GTTTAAGAGCTAGA | 6834 | TCGGAAACGACTGT | Stem loop | 7 | 90 |
| | 7 | ATAGCAAGTTTAAAT | | AATAGCAAGTTTAA | | ACGCGGCACCGAGT | 2 | | |
| | | AAGGCTAGTCCGTTAT | | ATAAGGCTAGTCCG | | CGGTGC | | | |
| | | CAGCGTACAGTCGGA | | TTATCAGCGTacag | | | | | |
| | | AACGACTGTACGCGG | | | | | | | |
| | | CACCGAGTCGGTGC | | | | | | | |
| 4167 | L2_e7_ | GTTTAAGAGCTAGAA | 6685 | GTTTAAGAGCTAGA | 6835 | CTGGAAACAGGCCA | Stem loop | 7 | 90 |
| | 8 | ATAGCAAGTTTAAAT | | AATAGCAAGTTTAA | | ACGCGGCACCGAGT | 2 | | |
| | | AAGGCTAGTCCGTTAT | | ATAAGGCTAGTCCG | | CGGTGC | | | |
| | | CAGCGTTGGCCTGGA | | TTATCAGCGTtggc | | | | | |
| | | AACAGGCCAACGCGG | | | | | | | |
| | | CACCGAGTCGGTGC | | | | | | | |
| 4168 | L2_e7_ | GTTTAAGAGCTAGAA | 6686 | GTTTAAGAGCTAGA | 6836 | GTCGAAAGACGGGC | Stem loop | 7 | 90 |
| | 9 | ATAGCAAGTTTAAAT | | AATAGCAAGTTTAA | | ACGCGGCACCGAGT | 2 | | |
| | | AAGGCTAGTCCGTTAT | | ATAAGGCTAGTCCG | | CGGTGC | | | |
| | | CAGCGTGCCCGTCGA | | TTATCAGCGTgccc | | | | | |
| | | AAGACGGGCACGCGG | | | | | | | |
| | | CACCGAGTCGGTGC | | | | | | | |
| 4169 | L2_e7_ | GTTTAAGAGCTAGAA | 6687 | GTTTAAGAGCTAGA | 6837 | GCTGAAAGGCCCGG | Stem loop | 7 | 90 |
| | 10 | ATAGCAAGTTTAAAT | | AATAGCAAGTTTAA | | ACGCGGCACCGAGT | 2 | | |
| | | AAGGCTAGTCCGTTAT | | ATAAGGCTAGTCCG | | CGGTGC | | | |
| | | CAGCGTCCGGGCTGA | | TTATCAGCGTccgg | | | | | |
| | | AAGGCCCGGACGCGG | | | | | | | |
| | | CACCGAGTCGGTGC | | | | | | | |
| 4170 | L2_e7_ | GTTTAAGAGCTAGAA | 6688 | GTTTAAGAGCTAGA | 6838 | GTGGAAATACGCTG | Stem loop | 7 | 90 |
| | 11 | ATAGCAAGTTTAAAT | | AATAGCAAGTTTAA | | ACGCGGCACCGAGT | 2 | | |
| | | AAGGCTAGTCCGTTAT | | ATAAGGCTAGTCCG | | CGGTGC | | | |
| | | CAGCGTCGGCGTGGA | | TTATCAGCGTcggc | | | | | |
| | | AATACGCTGACGCGG | | | | | | | |
| | | CACCGAGTCGGTGC | | | | | | | |
| 4171 | L2_e7_ | GTTTAAGAGCTAGAA | 6689 | GTTTAAGAGCTAGA | 6839 | CACGAAAGTGCCCC | Stem loop | 7 | 90 |
| | 12 | ATAGCAAGTTTAAAT | | AATAGCAAGTTTAA | | ACGCGGCACCGAGT | 2 | | |
| | | AAGGCTAGTCCGTTAT | | ATAAGGCTAGTCCG | | CGGTGC | | | |
| | | CAGCGTGGGGCACGA | | TTATCAGCGTgggg | | | | | |
| | | AAGTGCCCCACGCGG | | | | | | | |
| | | CACCGAGTCGGTGC | | | | | | | |
| 4172 | L2_e7_ | GTTTAAGAGCTAGAA | 6690 | GTTTAAGAGCTAGA | 6840 | CCGGAAATGGACCC | Stem loop | 7 | 90 |
| | 13 | ATAGCAAGTTTAAAT | | AATAGCAAGTTTAA | | ACGCGGCACCGAGT | 2 | | |
| | | AAGGCTAGTCCGTTAT | | ATAAGGCTAGTCCG | | CGGTGC | | | |
| | | CAGCGTGGGTCCGGA | | TTATCAGCGTgggt | | | | | |
| | | AATGGACCCACGCGG | | | | | | | |
| | | CACCGAGTCGGTGC | | | | | | | |
| 4173 | L2_e7_ | GTTTAAGAGCTAGAA | 6691 | GTTTAAGAGCTAGA | 6841 | ACGGAAACGTGTTG | Stem loop | 7 | 90 |
| | 14 | ATAGCAAGTTTAAAT | | AATAGCAAGTTTAA | | ACGCGGCACCGAGT | 2 | | |
| | | AAGGCTAGTCCGTTAT | | ATAAGGCTAGTCCG | | CGGTGC | | | |
| | | CAGCGTCAACACGGA | | TTATCAGCGTcaac | | | | | |
| | | AACGTGTTGACGCGG | | | | | | | |
| | | CACCGAGTCGGTGC | | | | | | | |
| 4174 | L2_e7_ | GTTTAAGAGCTAGAA | 6692 | GTTTAAGAGCTAGA | 6842 | GCTGAAAAGCCACA | Stem loop | 7 | 90 |
| | 15 | ATAGCAAGTTTAAAT | | AATAGCAAGTTTAA | | ACGCGGCACCGAGT | 2 | | |
| | | AAGGCTAGTCCGTTAT | | ATAAGGCTAGTCCG | | CGGTGC | | | |
| | | CAGCGTTGTGGCTGA | | TTATCAGCGTtgtg | | | | | |
| | | AAAGCCACAACGCGG | | | | | | | |
| | | CACCGAGTCGGTGC | | | | | | | |
| 4175 | L2_e7_ | GTTTAAGAGCTAGAA | 6693 | GTTTAAGAGCTAGA | 6843 | ACCGAAAGGTAACG | Stem loop | 7 | 90 |
| | 16 | ATAGCAAGTTTAAAT | | AATAGCAAGTTTAA | | ACGCGGCACCGAGT | 2 | | |
| | | AAGGCTAGTCCGTTAT | | ATAAGGCTAGTCCG | | CGGTGC | | | |
| | | CAGCGTCGTTACCGA | | TTATCAGCGTcgtt | | | | | |
| | | AAGGTAACGACGCGG | | | | | | | |
| | | CACCGAGTCGGTGC | | | | | | | |
| 4176 | L2_e7_ | GTTTAAGAGCTAGAA | 6694 | GTTTAAGAGCTAGA | 6844 | AGCGAAAGCTAGGC | Stem loop | 7 | 90 |
| | 17 | ATAGCAAGTTTAAAT | | AATAGCAAGTTTAA | | ACGCGGCACCGAGT | 2 | | |
| | | AAGGCTAGTCCGTTAT | | ATAAGGCTAGTCCG | | CGGTGC | | | |
| | | CAGCGTGCTTAGCGA | | TTATCAGCGTgctt | | | | | |
| | | AAGCTAGGCACGCGG | | | | | | | |
| | | CACCGAGTCGGTGC | | | | | | | |
| 4177 | L2_e7_ | GTTTAAGAGCTAGAA | 6695 | GTTTAAGAGCTAGA | 6845 | GCAGAAATGCGGTT | Stem loop | 7 | 90 |
| | 18 | ATAGCAAGTTTAAAT | | AATAGCAAGTTTAA | | ACGCGGCACCGAGT | 2 | | |
| | | AAGGCTAGTCCGTTAT | | ATAAGGCTAGTCCG | | CGGTGC | | | |
| | | CAGCGTAACCGCAGA | | TTATCAGCGTaacc | | | | | |
| | | AATGCGGTTACGCGG | | | | | | | |
| | | CACCGAGTCGGTGC | | | | | | | |
| 4178 | L2_e7_ | GTTTAAGAGCTAGAA | 6696 | GTTTAAGAGCTAGA | 6846 | TGGGAAACCGGTGT | Stem loop | 7 | 90 |
| | 19 | ATAGCAAGTTTAAAT | | AATAGCAAGTTTAA | | ACGCGGCACCGAGT | 2 | | |
| | | AAGGCTAGTCCGTTAT | | ATAAGGCTAGTCCG | | CGGTGC | | | |
| | | CAGCGTACACTGGGA | | TTATCAGCGTacac | | | | | |
| | | AACCGGTGTACGCGG | | | | | | | |
| | | CACCGAGTCGGTGC | | | | | | | |
| 4179 | L2_e7_ | GTTTAAGAGCTAGAA | 6697 | GTTTAAGAGCTAGA | 6847 | GGGGAAATCCCCGC | Stem loop | 7 | 90 |
| | 20 | ATAGCAAGTTTAAAT | | AATAGCAAGTTTAA | | ACGCGGCACCGAGT | 2 | | |
| | | AAGGCTAGTCCGTTAT | | ATAAGGCTAGTCCG | | CGGTGC | | | |
| | | CAGCGTGCGGGGGGA | | TTATCAGCGTgcgg | | | | | |
| | | AATCCCCGCACGCGG | | | | | | | |
| | | CACCGAGTCGGTGC | | | | | | | |
| 4180 | L2_e7_ | GTTTAAGAGCTAGAA | 6698 | GTTTAAGAGCTAGA | 6848 | TTCGAAAGGACGGA | Stem loop | 7 | 90 |
| | 21 | ATAGCAAGTTTAAAT | | AATAGCAAGTTTAA | | ACGCGGCACCGAGT | 2 | | |
| | | AAGGCTAGTCCGTTAT | | ATAAGGCTAGTCCG | | CGGTGC | | | |
| | | CAGCGTTCCGTTCGAA | | TTATCAGCGTtccg | | | | | |
| | | AGGACGGAACGCGGC | | | | | | | |
| | | ACCGAGTCGGTGC | | | | | | | |
| 4181 | L2_e7_ | GTTTAAGAGCTAGAA | 6699 | GTTTAAGAGCTAGA | 6849 | GCCGAAAGGCCAGG | Stem loop | 7 | 90 |
| | 22 | ATAGCAAGTTTAAAT | | AATAGCAAGTTTAA | | ACGCGGCACCGAGT | 2 | | |
| | | AAGGCTAGTCCGTTAT | | ATAAGGCTAGTCCG | | CGGTGC | | | |
| | | CAGCGTCCTGGCCGA | | TTATCAGCGTcctg | | | | | |
| | | AAGGCCAGGACGCGG | | | | | | | |
| | | CACCGAGTCGGTGC | | | | | | | |
| 4182 | L2_e7_ | GTTTAAGAGCTAGAA | 6700 | GTTTAAGAGCTAGA | 6850 | ACCGAAAGGTCCTG | Stem loop | 7 | 90 |
| | 23 | ATAGCAAGTTTAAAT | | AATAGCAAGTTTAA | | ACGCGGCACCGAGT | 2 | | |
| | | AAGGCTAGTCCGTTAT | | ATAAGGCTAGTCCG | | CGGTGC | | | |
| | | CAGCGTCAGGACCGA | | TTATCAGCGTcagg | | | | | |
| | | AAGGTCCTGACGCGG | | | | | | | |
| | | CACCGAGTCGGTGC | | | | | | | |
| 4183 | L2_e7_ | GTTTAAGAGCTAGAA | 6701 | GTTTAAGAGCTAGA | 6851 | GGAGAAATCCGGGG | Stem loop | 7 | 90 |
| | 24 | ATAGCAAGTTTAAAT | | AATAGCAAGTTTAA | | ACGCGGCACCGAGT | 2 | | |
| | | AAGGCTAGTCCGTTAT | | ATAAGGCTAGTCCG | | CGGTGC | | | |
| | | CAGCGTTTCCGGAGA | | TTATCAGCGTttec | | | | | |
| | | AATCCGGGGACGCGG | | | | | | | |
| | | CACCGAGTCGGTGC | | | | | | | |
| 4184 | L2_e7_ | GTTTAAGAGCTAGAA | 6702 | GTTTAAGAGCTAGA | 6852 | CGAGAAATCGACTC | Stem loop | 7 | 90 |
| | 25 | ATAGCAAGTTTAAAT | | AATAGCAAGTTTAA | | ACGCGGCACCGAGT | 2 | | |
| | | AAGGCTAGTCCGTTAT | | ATAAGGCTAGTCCG | | CGGTGC | | | |
| | | CAGCGTGAGTCGAGA | | TTATCAGCGTgagt | | | | | |
| | | AATCGACTCACGCGG | | | | | | | |
| | | CACCGAGTCGGTGC | | | | | | | |
| 4185 | L2_e7_ | GTTTAAGAGCTAGAA | 6703 | GTTTAAGAGCTAGA | 6853 | GTTGAAAGACAGGG | Stem loop | 7 | 90 |
| | 26 | ATAGCAAGTTTAAAT | | AATAGCAAGTTTAA | | ACGCGGCACCGAGT | 2 | | |
| | | AAGGCTAGTCCGTTAT | | ATAAGGCTAGTCCG | | CGGTGC | | | |
| | | CAGCGTCCCTGTTGAA | | TTATCAGCGTccct | | | | | |
| | | AGACAGGGACGCGGC | | | | | | | |
| | | ACCGAGTCGGTGC | | | | | | | |
| 4186 | L2_e7_ | GTTTAAGAGCTAGAA | 6704 | GTTTAAGAGCTAGA | 6854 | CCGGAAACGGTGGT | Stem loop | 7 | 90 |
| | 27 | ATAGCAAGTTTAAAT | | AATAGCAAGTTTAA | | ACGCGGCACCGAGT | 2 | | |
| | | AAGGCTAGTCCGTTAT | | ATAAGGCTAGTCCG | | CGGTGC | | | |
| | | CAGCGTATCACCGGA | | TTATCAGCGTatca | | | | | |
| | | AACGGTGGTACGCGG | | | | | | | |
| | | CACCGAGTCGGTGC | | | | | | | |
| 4187 | L2_e7_ | GTTTAAGAGCTAGAA | 6705 | GTTTAAGAGCTAGA | 6855 | CTGGAAACAGCGTC | Stem loop | 7 | 90 |
| | 28 | ATAGCAAGTTTAAAT | | AATAGCAAGTTTAA | | ACGCGGCACCGAGT | 2 | | |
| | | AAGGCTAGTCCGTTAT | | ATAAGGCTAGTCCG | | CGGTGC | | | |
| | | CAGCGTGACGCTGGA | | TTATCAGCGTgacg | | | | | |
| | | AACAGCGTCACGCGG | | | | | | | |
| | | CACCGAGTCGGTGC | | | | | | | |
| 4188 | L2_e7_ | GTTTAAGAGCTAGAA | 6706 | GTTTAAGAGCTAGA | 6856 | GCGGAAACGCGCGA | Stem loop | 7 | 90 |
| | 29 | ATAGCAAGTTTAAAT | | AATAGCAAGTTTAA | | ACGCGGCACCGAGT | 2 | | |
| | | AAGGCTAGTCCGTTAT | | ATAAGGCTAGTCCG | | CGGTGC | | | |
| | | CAGCGTTCGCGCGGA | | TTATCAGCGTtcgc | | | | | |
| | | AACGCGCGAACGCGG | | | | | | | |
| | | CACCGAGTCGGTGC | | | | | | | |
| 4189 | L2_e7_ | GTTTAAGAGCTAGAA | 6707 | GTTTAAGAGCTAGA | 6857 | ATGGAAACATCCCG | Stem loop | 7 | 90 |
| | 30 | ATAGCAAGTTTAAAT | | AATAGCAAGTTTAA | | ACGCGGCACCGAGT | 2 | | |
| | | AAGGCTAGTCCGTTAT | | ATAAGGCTAGTCCG | | CGGTGC | | | |
| | | CAGCGTCGGGATGGA | | TTATCAGCGTcggg | | | | | |
| | | AACATCCCGACGCGG | | | | | | | |
| | | CACCGAGTCGGTGC | | | | | | | |
| 4190 | L2_e7_ | GTTTAAGAGCTAGAA | 6708 | GTTTAAGAGCTAGA | 6858 | CGCGAAAGCGGTGC | Stem loop | 7 | 90 |
| | 31 | ATAGCAAGTTTAAAT | | AATAGCAAGTTTAA | | ACGCGGCACCGAGT | 2 | | |
| | | AAGGCTAGTCCGTTAT | | ATAAGGCTAGTCCG | | CGGTGC | | | |
| | | CAGCGTGTACCGCGA | | TTATCAGCGTgtac | | | | | |
| | | AAGCGGTGCACGCGG | | | | | | | |
| | | CACCGAGTCGGTGC | | | | | | | |
| 4191 | L2_e7_ | GTTTAAGAGCTAGAA | 6709 | GTTTAAGAGCTAGA | 6859 | GCTGAAAAGCGCGG | Stem loop | 7 | 90 |
| | 32 | ATAGCAAGTTTAAAT | | AATAGCAAGTTTAA | | ACGCGGCACCGAGT | 2 | | |
| | | AAGGCTAGTCCGTTAT | | ATAAGGCTAGTCCG | | CGGTGC | | | |
| | | CAGCGTCCGCGCTGA | | TTATCAGCGTccgc | | | | | |
| | | AAAGCGCGGACGCGG | | | | | | | |
| | | CACCGAGTCGGTGC | | | | | | | |
| 4192 | L2_e7_ | GTTTAAGAGCTAGAA | 6710 | GTTTAAGAGCTAGA | 6860 | GAGGAAACTCTCGT | Stem loop | 7 | 90 |
| | 33 | ATAGCAAGTTTAAAT | | AATAGCAAGTTTAA | | ACGCGGCACCGAGT | 2 | | |
| | | AAGGCTAGTCCGTTAT | | ATAAGGCTAGTCCG | | CGGTGC | | | |
| | | CAGCGTGCGAGAGGA | | TTATCAGCGTgcga | | | | | |
| | | AACTCTCGTACGCGGC | | | | | | | |
| | | ACCGAGTCGGTGC | | | | | | | |
| 4193 | L2_e7_ | GTTTAAGAGCTAGAA | 6711 | GTTTAAGAGCTAGA | 6861 | CTCGAAAGAGTGTC | Stem loop | 7 | 90 |
| | 34 | ATAGCAAGTTTAAAT | | AATAGCAAGTTTAA | | ACGCGGCACCGAGT | 2 | | |
| | | AAGGCTAGTCCGTTAT | | ATAAGGCTAGTCCG | | CGGTGC | | | |
| | | CAGCGTGACGCTCGA | | TTATCAGCGTgacg | | | | | |
| | | AAGAGTGTCACGCGG | | | | | | | |
| | | CACCGAGTCGGTGC | | | | | | | |
| 4194 | L2_e7_ | GTTTAAGAGCTAGAA | 6712 | GTTTAAGAGCTAGA | 6862 | CTCGAAAGAGGCAT | Stem loop | 7 | 90 |
| | 35 | ATAGCAAGTTTAAAT | | AATAGCAAGTTTAA | | ACGCGGCACCGAGT | 2 | | |
| | | AAGGCTAGTCCGTTAT | | ATAAGGCTAGTCCG | | CGGTGC | | | |
| | | CAGCGTGTGCCTCGA | | TTATCAGCGTgtgc | | | | | |
| | | AAGAGGCATACGCGG | | | | | | | |
| | | CACCGAGTCGGTGC | | | | | | | |
| 4195 | L2_e7_ | GTTTAAGAGCTAGAA | 6713 | GTTTAAGAGCTAGA | 6863 | CGGGAAACCGTTGC | Stem loop | 7 | 90 |
| | 36 | ATAGCAAGTTTAAAT | | AATAGCAAGTTTAA | | ACGCGGCACCGAGT | 2 | | |
| | | AAGGCTAGTCCGTTAT | | ATAAGGCTAGTCCG | | CGGTGC | | | |
| | | CAGCGTGCAACGGGA | | TTATCAGCGTgcaa | | | | | |
| | | AACCGTTGCACGCGG | | | | | | | |
| | | CACCGAGTCGGTGC | | | | | | | |
| 4196 | L2_e7_ | GTTTAAGAGCTAGAA | 6714 | GTTTAAGAGCTAGA | 6864 | TCGGAAACGATCGG | Stem loop | 7 | 90 |
| | 37 | ATAGCAAGTTTAAAT | | AATAGCAAGTTTAA | | ACGCGGCACCGAGT | 2 | | |
| | | AAGGCTAGTCCGTTAT | | ATAAGGCTAGTCCG | | CGGTGC | | | |
| | | CAGCGTCCGATCGGA | | TTATCAGCGTccga | | | | | |
| | | AACGATCGGACGCGG | | | | | | | |
| | | CACCGAGTCGGTGC | | | | | | | |
| 4197 | L2_e7_ | GTTTAAGAGCTAGAA | 6715 | GTTTAAGAGCTAGA | 6865 | TGCGAAAGCAACAG | Stem loop | 7 | 90 |
| | 38 | ATAGCAAGTTTAAAT | | AATAGCAAGTTTAA | | ACGCGGCACCGAGT | 2 | | |
| | | AAGGCTAGTCCGTTAT | | ATAAGGCTAGTCCG | | CGGTGC | | | |
| | | CAGCGTCTGTTGCGAA | | TTATCAGCGTctgt | | | | | |
| | | AGCAACAGACGCGGC | | | | | | | |
| | | ACCGAGTCGGTGC | | | | | | | |
| 4198 | L2_e7_ | GTTTAAGAGCTAGAA | 6716 | GTTTAAGAGCTAGA | 6866 | TTCGAAAGAATCCC | Stem loop | 7 | 90 |
| | 39 | ATAGCAAGTTTAAAT | | AATAGCAAGTTTAA | | ACGCGGCACCGAGT | 2 | | |
| | | AAGGCTAGTCCGTTAT | | ATAAGGCTAGTCCG | | CGGTGC | | | |
| | | CAGCGTGGGATTCGA | | TTATCAGCGTggga | | | | | |
| | | AAGAATCCCACGCGG | | | | | | | |
| | | CACCGAGTCGGTGC | | | | | | | |
| 4199 | L2_e7_ | GTTTAAGAGCTAGAA | 6717 | GTTTAAGAGCTAGA | 6867 | CAGGAAACTGGGTA | Stem loop | 7 | 90 |
| | 40 | ATAGCAAGTTTAAAT | | AATAGCAAGTTTAA | | ACGCGGCACCGAGT | 2 | | |
| | | AAGGCTAGTCCGTTAT | | ATAAGGCTAGTCCG | | CGGTGC | | | |
| | | CAGCGTTACCCAGGA | | TTATCAGCGTtacc | | | | | |
| | | AACTGGGTAACGCGG | | | | | | | |
| | | CACCGAGTCGGTGC | | | | | | | |
| 4200 | L2_e7_ | GTTTAAGAGCTAGAA | 6718 | GTTTAAGAGCTAGA | 6868 | TCCGAAAGGAAGGT | Stem loop | 7 | 90 |
| | 41 | ATAGCAAGTTTAAAT | | AATAGCAAGTTTAA | | ACGCGGCACCGAGT | 2 | | |
| | | AAGGCTAGTCCGTTAT | | ATAAGGCTAGTCCG | | CGGTGC | | | |
| | | CAGCGTACCTTCCGAA | | TTATCAGCGTacct | | | | | |
| | | AGGAAGGTACGCGGC | | | | | | | |
| | | ACCGAGTCGGTGC | | | | | | | |
| 4201 | L2_e7_ | GTTTAAGAGCTAGAA | 6719 | GTTTAAGAGCTAGA | 6869 | GCAGAAATGCCGAG | Stem loop | 7 | 90 |
| | 42 | ATAGCAAGTTTAAAT | | AATAGCAAGTTTAA | | ACGCGGCACCGAGT | 2 | | |
| | | AAGGCTAGTCCGTTAT | | ATAAGGCTAGTCCG | | CGGTGC | | | |
| | | CAGCGTCTCGGCAGA | | TTATCAGCGTctcg | | | | | |
| | | AATGCCGAGACGCGG | | | | | | | |
| | | CACCGAGTCGGTGC | | | | | | | |
| 4202 | L2_e7_ | GTTTAAGAGCTAGAA | 6720 | GTTTAAGAGCTAGA | 6870 | GCCGAAAGGCTTAG | Stem loop | 7 | 90 |
| | 43 | ATAGCAAGTTTAAAT | | AATAGCAAGTTTAA | | ACGCGGCACCGAGT | 2 | | |
| | | AAGGCTAGTCCGTTAT | | ATAAGGCTAGTCCG | | CGGTGC | | | |
| | | CAGCGTCTGAGCCGA | | TTATCAGCGTctga | | | | | |
| | | AAGGCTTAGACGCGG | | | | | | | |
| | | CACCGAGTCGGTGC | | | | | | | |
| 4203 | L2_e7_ | GTTTAAGAGCTAGAA | 6721 | GTTTAAGAGCTAGA | 6871 | CTCGAAAGAGGGCC | Stem loop | 7 | 90 |
| | 44 | ATAGCAAGTTTAAAT | | AATAGCAAGTTTAA | | ACGCGGCACCGAGT | 2 | | |
| | | AAGGCTAGTCCGTTAT | | ATAAGGCTAGTCCG | | CGGTGC | | | |
| | | CAGCGTGGCCCTCGA | | TTATCAGCGTggcc | | | | | |
| | | AAGAGGGCCACGCGG | | | | | | | |
| | | CACCGAGTCGGTGC | | | | | | | |
| 4204 | L2_e7_ | GTTTAAGAGCTAGAA | 6722 | GTTTAAGAGCTAGA | 6872 | GGAGAAATCCTGCG | Stem loop | 7 | 90 |
| | 45 | ATAGCAAGTTTAAAT | | AATAGCAAGTTTAA | | ACGCGGCACCGAGT | 2 | | |
| | | AAGGCTAGTCCGTTAT | | ATAAGGCTAGTCCG | | CGGTGC | | | |
| | | CAGCGTCGCAGGAGA | | TTATCAGCGTcgca | | | | | |
| | | AATCCTGCGACGCGG | | | | | | | |
| | | CACCGAGTCGGTGC | | | | | | | |
| 4205 | L2_e7_ | GTTTAAGAGCTAGAA | 6723 | GTTTAAGAGCTAGA | 6873 | CGTGAAAACGGCTA | Stem loop | 7 | 90 |
| | 46 | ATAGCAAGTTTAAAT | | AATAGCAAGTTTAA | | ACGCGGCACCGAGT | 2 | | |
| | | AAGGCTAGTCCGTTAT | | ATAAGGCTAGTCCG | | CGGTGC | | | |
| | | CAGCGTTAGCCGTGA | | TTATCAGCGTtagc | | | | | |
| | | AAACGGCTAACGCGG | | | | | | | |
| | | CACCGAGTCGGTGC | | | | | | | |
| 4206 | L2_e7_ | GTTTAAGAGCTAGAA | 6724 | GTTTAAGAGCTAGA | 6874 | GTGGAAACACCTTG | Stem loop | 7 | 90 |
| | 47 | ATAGCAAGTTTAAAT | | AATAGCAAGTTTAA | | ACGCGGCACCGAGT | 2 | | |
| | | AAGGCTAGTCCGTTAT | | ATAAGGCTAGTCCG | | CGGTGC | | | |
| | | CAGCGTCAAGGTGGA | | TTATCAGCGTcaag | | | | | |
| | | AACACCTTGACGCGG | | | | | | | |
| | | CACCGAGTCGGTGC | | | | | | | |
| 4207 | L2_e7_ | GTTTAAGAGCTAGAA | 6725 | GTTTAAGAGCTAGA | 6875 | CCGGAAACGGTTGG | Stem loop | 7 | 90 |
| | 48 | ATAGCAAGTTTAAAT | | AATAGCAAGTTTAA | | ACGCGGCACCGAGT | 2 | | |
| | | AAGGCTAGTCCGTTAT | | ATAAGGCTAGTCCG | | CGGTGC | | | |
| | | CAGCGTCCAACCGGA | | TTATCAGCGTccaa | | | | | |
| | | AACGGTTGGACGCGG | | | | | | | |
| | | CACCGAGTCGGTGC | | | | | | | |
| 4208 | L2_e7_ | GTTTAAGAGCTAGAA | 6726 | GTTTAAGAGCTAGA | 6876 | GAGGAAACTTGTGC | Stem loop | 7 | 90 |
| | 49 | ATAGCAAGTTTAAAT | | AATAGCAAGTTTAA | | ACGCGGCACCGAGT | 2 | | |
| | | AAGGCTAGTCCGTTAT | | ATAAGGCTAGTCCG | | CGGTGC | | | |
| | | CAGCGTGCACGAGGA | | TTATCAGCGTgcac | | | | | |
| | | AACTTGTGCACGCGG | | | | | | | |
| | | CACCGAGTCGGTGC | | | | | | | |
| 4209 | L2_e7 | GTTTAAGAGCTAGAA | 6727 | GTTTAAGAGCTAGA | 6877 | TGTGAAAGCACACG | Stem loop | 7 | 90 |
| | 50 | ATAGCAAGTTTAAAT | | AATAGCAAGTTTAA | | ACGCGGCACCGAGT | 2 | | |
| | | AAGGCTAGTCCGTTAT | | ATAAGGCTAGTCCG | | CGGTGC | | | |
| | | CAGCGTCGTGTGTGA | | TTATCAGCGTcgtg | | | | | |
| | | AAGCACACGACGCGG | | | | | | | |
| | | CACCGAGTCGGTGC | | | | | | | |
| 4210 | L2_e7_ | GTTTAAGAGCTAGAA | 6728 | GTTTAAGAGCTAGA | 6878 | TGCGAAAGCACCAG | Stem loop | 7 | 90 |
| | 51 | ATAGCAAGTTTAAAT | | AATAGCAAGTTTAA | | ACGCGGCACCGAGT | 2 | | |
| | | AAGGCTAGTCCGTTAT | | ATAAGGCTAGTCCG | | CGGTGC | | | |
| | | CAGCGTCTGGTGCGA | | TTATCAGCGTctgg | | | | | |
| | | AAGCACCAGACGCGG | | | | | | | |
| | | CACCGAGTCGGTGC | | | | | | | |
| 4211 | L2_e7_ | GTTTAAGAGCTAGAA | 6729 | GTTTAAGAGCTAGA | 6879 | AGGGAAACCTGACA | Stem loop | 7 | 90 |
| | 52 | ATAGCAAGTTTAAAT | | AATAGCAAGTTTAA | | ACGCGGCACCGAGT | 2 | | |
| | | AAGGCTAGTCCGTTAT | | ATAAGGCTAGTCCG | | CGGTGC | | | |
| | | CAGCGTTGTCAGGGA | | TTATCAGCGTtgtc | | | | | |
| | | AACCTGACAACGCGG | | | | | | | |
| | | CACCGAGTCGGTGC | | | | | | | |
| 4212 | L2_e7_ | GTTTAAGAGCTAGAA | 6730 | GTTTAAGAGCTAGA | 6880 | GATGAAAATCCCGG | Stem loop | 7 | 90 |
| | 53 | ATAGCAAGTTTAAAT | | AATAGCAAGTTTAA | | ACGCGGCACCGAGT | 2 | | |
| | | AAGGCTAGTCCGTTAT | | ATAAGGCTAGTCCG | | CGGTGC | | | |
| | | CAGCGTCCGGGATGA | | TTATCAGCGTccgg | | | | | |
| | | AAATCCCGGACGCGG | | | | | | | |
| | | CACCGAGTCGGTGC | | | | | | | |
| 4213 | L2_e7_ | GTTTAAGAGCTAGAA | 6731 | GTTTAAGAGCTAGA | 6881 | CCGGAAACGGATCT | Stem loop | 7 | 90 |
| | 54 | ATAGCAAGTTTAAAT | | AATAGCAAGTTTAA | | ACGCGGCACCGAGT | 2 | | |
| | | AAGGCTAGTCCGTTAT | | ATAAGGCTAGTCCG | | CGGTGC | | | |
| | | CAGCGTAGATCCGGA | | TTATCAGCGTagat | | | | | |
| | | AACGGATCTACGCGG | | | | | | | |
| | | CACCGAGTCGGTGC | | | | | | | |
| 4214 | L2_e7_ | GTTTAAGAGCTAGAA | 6732 | GTTTAAGAGCTAGA | 6882 | GGCGAAAGCCAAGT | Stem loop | 7 | 90 |
| | 55 | ATAGCAAGTTTAAAT | | AATAGCAAGTTTAA | | ACGCGGCACCGAGT | 2 | | |
| | | AAGGCTAGTCCGTTAT | | ATAAGGCTAGTCCG | | CGGTGC | | | |
| | | CAGCGTACTTGGCGA | | TTATCAGCGTactt | | | | | |
| | | AAGCCAAGTACGCGG | | | | | | | |
| | | CACCGAGTCGGTGC | | | | | | | |
| 4215 | L2_e7_ | GTTTAAGAGCTAGAA | 6733 | GTTTAAGAGCTAGA | 6883 | GCCGAAAGGCCATT | Stem loop | 7 | 90 |
| | 56 | ATAGCAAGTTTAAAT | | AATAGCAAGTTTAA | | ACGCGGCACCGAGT | 2 | | |
| | | AAGGCTAGTCCGTTAT | | ATAAGGCTAGTCCG | | CGGTGC | | | |
| | | CAGCGTGATGGCCGA | | TTATCAGCGTgatg | | | | | |
| | | AAGGCCATTACGCGG | | | | | | | |
| | | CACCGAGTCGGTGC | | | | | | | |
| 4216 | L2_e7_ | GTTTAAGAGCTAGAA | 6734 | GTTTAAGAGCTAGA | 6884 | CGCGAAAGTGGTGG | Stem loop | 7 | 90 |
| | 57 | ATAGCAAGTTTAAAT | | AATAGCAAGTTTAA | | ACGCGGCACCGAGT | 2 | | |
| | | AAGGCTAGTCCGTTAT | | ATAAGGCTAGTCCG | | CGGTGC | | | |
| | | CAGCGTCCATCGCGA | | TTATCAGCGTccat | | | | | |
| | | AAGTGGTGGACGCGG | | | | | | | |
| | | CACCGAGTCGGTGC | | | | | | | |
| 4217 | L2_e7_ | GTTTAAGAGCTAGAA | 6735 | GTTTAAGAGCTAGA | 6885 | CCCGAAAGGGGGTC | Stem loop | 7 | 90 |
| | 58 | ATAGCAAGTTTAAAT | | AATAGCAAGTTTAA | | ACGCGGCACCGAGT | 2 | | |
| | | AAGGCTAGTCCGTTAT | | ATAAGGCTAGTCCG | | CGGTGC | | | |
| | | CAGCGTGACCCCCGA | | TTATCAGCGTgacc | | | | | |
| | | AAGGGGGTCACGCGG | | | | | | | |
| | | CACCGAGTCGGTGC | | | | | | | |
| 4218 | L2_e7_ | GTTTAAGAGCTAGAA | 6736 | GTTTAAGAGCTAGA | 6886 | ACGGAAACGTTCCG | Stem loop | 7 | 90 |
| | 59 | ATAGCAAGTTTAAAT | | AATAGCAAGTTTAA | | ACGCGGCACCGAGT | 2 | | |
| | | AAGGCTAGTCCGTTAT | | ATAAGGCTAGTCCG | | CGGTGC | | | |
| | | CAGCGTCGGAACGGA | | TTATCAGCGTogga | | | | | |
| | | AACGTTCCGACGCGG | | | | | | | |
| | | CACCGAGTCGGTGC | | | | | | | |
| 4219 | L2_e7_ | GTTTAAGAGCTAGAA | 6737 | GTTTAAGAGCTAGA | 6887 | GCGGAAACGCTCCA | Stem loop | 7 | 90 |
| | 60 | ATAGCAAGTTTAAAT | | AATAGCAAGTTTAA | | ACGCGGCACCGAGT | 2 | | |
| | | AAGGCTAGTCCGTTAT | | ATAAGGCTAGTCCG | | CGGTGC | | | |
| | | CAGCGTTGGAGCGGA | | TTATCAGCGTtgga | | | | | |
| | | AACGCTCCAACGCGG | | | | | | | |
| | | CACCGAGTCGGTGC | | | | | | | |
| 4220 | L2_e7_ | GTTTAAGAGCTAGAA | 6738 | GTTTAAGAGCTAGA | 6888 | TCCGAAAGGAACGT | Stem loop | 7 | 90 |
| | 61 | ATAGCAAGTTTAAAT | | AATAGCAAGTTTAA | | ACGCGGCACCGAGT | 2 | | |
| | | AAGGCTAGTCCGTTAT | | ATAAGGCTAGTCCG | | CGGTGC | | | |
| | | CAGCGTACGTTCCGA | | TTATCAGCGTacgt | | | | | |
| | | AAGGAACGTACGCGG | | | | | | | |
| | | CACCGAGTCGGTGC | | | | | | | |
| 4221 | L2_e7_ | GTTTAAGAGCTAGAA | 6739 | GTTTAAGAGCTAGA | 6889 | CTAGAAATAGCGAC | Stem loop | 7 | 90 |
| | 62 | ATAGCAAGTTTAAAT | | AATAGCAAGTTTAA | | ACGCGGCACCGAGT | 2 | | |
| | | AAGGCTAGTCCGTTAT | | ATAAGGCTAGTCCG | | CGGTGC | | | |
| | | CAGCGTGTCGCTAGA | | TTATCAGCGTgtcg | | | | | |
| | | AATAGCGACACGCGG | | | | | | | |
| | | CACCGAGTCGGTGC | | | | | | | |
| 4222 | L2_e7_ | GTTTAAGAGCTAGAA | 6740 | GTTTAAGAGCTAGA | 6890 | AGCGAAAGCTCTTC | Stem loop | 7 | 90 |
| | 63 | ATAGCAAGTTTAAAT | | AATAGCAAGTTTAA | | ACGCGGCACCGAGT | 2 | | |
| | | AAGGCTAGTCCGTTAT | | ATAAGGCTAGTCCG | | CGGTGC | | | |
| | | CAGCGTGAAGAGCGA | | TTATCAGCGTgaag | | | | | |
| | | AAGCTCTTCACGCGGC | | | | | | | |
| | | ACCGAGTCGGTGC | | | | | | | |
| 4223 | L2_e7_ | GTTTAAGAGCTAGAA | 6741 | GTTTAAGAGCTAGA | 6891 | GGGGAAACTCGCTT | Stem loop | 7 | 90 |
| | 64 | ATAGCAAGTTTAAAT | | AATAGCAAGTTTAA | | ACGCGGCACCGAGT | 2 | | |
| | | AAGGCTAGTCCGTTAT | | ATAAGGCTAGTCCG | | CGGTGC | | | |
| | | CAGCGTAAGCGGGGA | | TTATCAGCGTaagc | | | | | |
| | | AACTCGCTTACGCGGC | | | | | | | |
| | | ACCGAGTCGGTGC | | | | | | | |
| 4224 | L2_e7_ | GTTTAAGAGCTAGAA | 6742 | GTTTAAGAGCTAGA | 6892 | TTCGAAAGGGCAGC | Stem loop | 7 | 90 |
| | 65 | ATAGCAAGTTTAAAT | | AATAGCAAGTTTAA | | ACGCGGCACCGAGT | 2 | | |
| | | AAGGCTAGTCCGTTAT | | ATAAGGCTAGTCCG | | CGGTGC | | | |
| | | CAGCGTGCTGTTCGAA | | TTATCAGCGTgctg | | | | | |
| | | AGGGCAGCACGCGGC | | | | | | | |
| | | ACCGAGTCGGTGC | | | | | | | |
| 4225 | L2_e7_ | GTTTAAGAGCTAGAA | 6743 | GTTTAAGAGCTAGA | 6893 | CAGGAAACTGGGCT | Stem loop | 7 | 90 |
| | 66 | ATAGCAAGTTTAAAT | | AATAGCAAGTTTAA | | ACGCGGCACCGAGT | 2 | | |
| | | AAGGCTAGTCCGTTAT | | ATAAGGCTAGTCCG | | CGGTGC | | | |
| | | CAGCGTGGTCCAGGA | | TTATCAGCGTggtc | | | | | |
| | | AACTGGGCTACGCGG | | | | | | | |
| | | CACCGAGTCGGTGC | | | | | | | |
| 4226 | L2_e7_ | GTTTAAGAGCTAGAA | 6744 | GTTTAAGAGCTAGA | 6894 | CCAGAAATGGAGGC | Stem loop | 7 | 90 |
| | 67 | ATAGCAAGTTTAAAT | | AATAGCAAGTTTAA | | ACGCGGCACCGAGT | 2 | | |
| | | AAGGCTAGTCCGTTAT | | ATAAGGCTAGTCCG | | CGGTGC | | | |
| | | CAGCGTGCTTCCAGA | | TTATCAGCGTgctt | | | | | |
| | | AATGGAGGCACGCGG | | | | | | | |
| | | CACCGAGTCGGTGC | | | | | | | |
| 4227 | L2_e7_ | GTTTAAGAGCTAGAA | 6745 | GTTTAAGAGCTAGA | 6895 | GGTGAAAACCGGCT | Stem loop | 7 | 90 |
| | 68 | ATAGCAAGTTTAAAT | | AATAGCAAGTTTAA | | ACGCGGCACCGAGT | 2 | | |
| | | AAGGCTAGTCCGTTAT | | ATAAGGCTAGTCCG | | CGGTGC | | | |
| | | CAGCGTAGCCGGTGA | | TTATCAGCGTagcc | | | | | |
| | | AAACCGGCTACGCGG | | | | | | | |
| | | CACCGAGTCGGTGC | | | | | | | |
| 4228 | L2_e7_ | GTTTAAGAGCTAGAA | 6746 | GTTTAAGAGCTAGA | 6896 | GCGGAAACGCCGTC | Stem loop | 7 | 90 |
| | 69 | ATAGCAAGTTTAAAT | | AATAGCAAGTTTAA | | ACGCGGCACCGAGT | 2 | | |
| | | AAGGCTAGTCCGTTAT | | ATAAGGCTAGTCCG | | CGGTGC | | | |
| | | CAGCGTGACGGCGGA | | TTATCAGCGTgacg | | | | | |
| | | AACGCCGTCACGCGG | | | | | | | |
| | | CACCGAGTCGGTGC | | | | | | | |
| 4229 | L2_e7_ | GTTTAAGAGCTAGAA | 6747 | GTTTAAGAGCTAGA | 6897 | GCCGAAAGGCGAAG | Stem loop | 7 | 90 |
| | 70 | ATAGCAAGTTTAAAT | | AATAGCAAGTTTAA | | ACGCGGCACCGAGT | 2 | | |
| | | AAGGCTAGTCCGTTAT | | ATAAGGCTAGTCCG | | CGGTGC | | | |
| | | CAGCGTCTTCGCCGAA | | TTATCAGCGTette | | | | | |
| | | AGGCGAAGACGCGGC | | | | | | | |
| | | ACCGAGTCGGTGC | | | | | | | |
| 4230 | L2_e7_ | GTTTAAGAGCTAGAA | 6748 | GTTTAAGAGCTAGA | 6898 | CACGAAAGTGAGGG | Stem loop | 7 | 90 |
| | 71 | ATAGCAAGTTTAAAT | | AATAGCAAGTTTAA | | ACGCGGCACCGAGT | 2 | | |
| | | AAGGCTAGTCCGTTAT | | ATAAGGCTAGTCCG | | CGGTGC | | | |
| | | CAGCGTCTCTCACGAA | | TTATCAGCGTctct | | | | | |
| | | AGTGAGGGACGCGGC | | | | | | | |
| | | ACCGAGTCGGTGC | | | | | | | |
| 4231 | L2_e7_ | GTTTAAGAGCTAGAA | 6749 | GTTTAAGAGCTAGA | 6899 | GGCGAAAGCCTACT | Stem loop | 7 | 90 |
| | 72 | ATAGCAAGTTTAAAT | | AATAGCAAGTTTAA | | ACGCGGCACCGAGT | 2 | | |
| | | AAGGCTAGTCCGTTAT | | ATAAGGCTAGTCCG | | CGGTGC | | | |
| | | CAGCGTAGTAGGCGA | | TTATCAGCGTagta | | | | | |
| | | AAGCCTACTACGCGG | | | | | | | |
| | | CACCGAGTCGGTGC | | | | | | | |
| 4232 | L2_e7_ | GTTTAAGAGCTAGAA | 6750 | GTTTAAGAGCTAGA | 6900 | TCAGAAATGACCTG | Stem loop | 7 | 90 |
| | 73 | ATAGCAAGTTTAAAT | | AATAGCAAGTTTAA | | ACGCGGCACCGAGT | 2 | | |
| | | AAGGCTAGTCCGTTAT | | ATAAGGCTAGTCCG | | CGGTGC | | | |
| | | CAGCGTCGGGTCAGA | | TTATCAGCGTcggg | | | | | |
| | | AATGACCTGACGCGG | | | | | | | |
| | | CACCGAGTCGGTGC | | | | | | | |
| 4233 | L2_e7_ | GTTTAAGAGCTAGAA | 6751 | GTTTAAGAGCTAGA | 6901 | TCGGAAACGAGCTA | Stem loop | 7 | 90 |
| | 74 | ATAGCAAGTTTAAAT | | AATAGCAAGTTTAA | | ACGCGGCACCGAGT | 2 | | |
| | | AAGGCTAGTCCGTTAT | | ATAAGGCTAGTCCG | | CGGTGC | | | |
| | | CAGCGTTAGCTCGGA | | TTATCAGCGTtagc | | | | | |
| | | AACGAGCTAACGCGG | | | | | | | |
| | | CACCGAGTCGGTGC | | | | | | | |
| 4234 | L2_e7_ | GTTTAAGAGCTAGAA | 6752 | GTTTAAGAGCTAGA | 6902 | CCAGAAATGGGTGC | Stem loop | 7 | 90 |
| | 75 | ATAGCAAGTTTAAAT | | AATAGCAAGTTTAA | | ACGCGGCACCGAGT | 2 | | |
| | | AAGGCTAGTCCGTTAT | | ATAAGGCTAGTCCG | | CGGTGC | | | |
| | | CAGCGTGCGCCCAGA | | TTATCAGCGTgcgc | | | | | |
| | | AATGGGTGCACGCGG | | | | | | | |
| | | CACCGAGTCGGTGC | | | | | | | |
| 4235 | L2_e8_ | GTTTAAGAGCTAGAA | 6753 | GTTTAAGAGCTAGA | 6903 | CTTGAAAGAGTGGG | Stem loop | 8 | 92 |
| | 1 | ATAGCAAGTTTAAAT | | AATAGCAAGTTTAA | | AACGCGGCACCGAG | 2 | | |
| | | AAGGCTAGTCCGTTAT | | ATAAGGCTAGTCCG | | TCGGTGC | | | |
| | | CAGCGTTCCCACTTGA | | TTATCAGCGTtccca | | | | | |
| | | AAGAGTGGGAACGCG | | | | | | | |
| | | GCACCGAGTCGGTGC | | | | | | | |
| 4236 | L2_e8_ | GTTTAAGAGCTAGAA | 6754 | GTTTAAGAGCTAGA | 6904 | CCCGAAAGGGGGAT | Stem loop | 8 | 92 |
| | 2 | ATAGCAAGTTTAAAT | | AATAGCAAGTTTAA | | GACGCGGCACCGAG | 2 | | |
| | | AAGGCTAGTCCGTTAT | | ATAAGGCTAGTCCG | | TCGGTGC | | | |
| | | CAGCGTCGTCCCCCGA | | TTATCAGCGTegtcc | | | | | |
| | | AAGGGGGATGACGCG | | | | | | | |
| | | GCACCGAGTCGGTGC | | | | | | | |
| 4237 | L2_e8_ | GTTTAAGAGCTAGAA | 6755 | GTTTAAGAGCTAGA | 6905 | GGAGAAATCCCTGC | Stem loop | 8 | 92 |
| | 3 | ATAGCAAGTTTAAAT | | AATAGCAAGTTTAA | | AACGCGGCACCGAG | 2 | | |
| | | AAGGCTAGTCCGTTAT | | ATAAGGCTAGTCCG | | TCGGTGC | | | |
| | | CAGCGTTGCAGGGAG | | TTATCAGCGTtgcag | | | | | |
| | | AAATCCCTGCAACGC | | | | | | | |
| | | GGCACCGAGTCGGTG | | | | | | | |
| | | C | | | | | | | |
| 4238 | L2_e8_ | GTTTAAGAGCTAGAA | 6756 | GTTTAAGAGCTAGA | 6906 | AAGGAAATTTGGCG | Stem loop | 8 | 92 |
| | 4 | ATAGCAAGTTTAAAT | | AATAGCAAGTTTAA | | GACGCGGCACCGAG | 2 | | |
| | | AAGGCTAGTCCGTTAT | | ATAAGGCTAGTCCG | | TCGGTGC | | | |
| | | CAGCGTTCGCCAAGG | | TTATCAGCGTtegcc | | | | | |
| | | AAATTTGGCGGACGC | | | | | | | |
| | | GGCACCGAGTCGGTG | | | | | | | |
| | | C | | | | | | | |
| 4239 | L2_e8_ | GTTTAAGAGCTAGAA | 6757 | GTTTAAGAGCTAGA | 6907 | GCCGAAAGGCCCCG | Stem loop | 8 | 92 |
| | 5 | ATAGCAAGTTTAAAT | | AATAGCAAGTTTAA | | AACGCGGCACCGAG | 2 | | |
| | | AAGGCTAGTCCGTTAT | | ATAAGGCTAGTCCG | | TCGGTGC | | | |
| | | CAGCGTTCGGGGCCG | | TTATCAGCGTtcggg | | | | | |
| | | AAAGGCCCCGAACGC | | | | | | | |
| | | GGCACCGAGTCGGTG | | | | | | | |
| | | C | | | | | | | |
| 4240 | L2_e8_ | GTTTAAGAGCTAGAA | 6758 | GTTTAAGAGCTAGA | 6908 | TGGGAAACTACCTG | Stem loop | 8 | 92 |
| | 6 | ATAGCAAGTTTAAAT | | AATAGCAAGTTTAA | | AACGCGGCACCGAG | 2 | | |
| | | AAGGCTAGTCCGTTAT | | ATAAGGCTAGTCCG | | TCGGTGC | | | |
| | | CAGCGTTCGGGTGGG | | TTATCAGCGTtcggg | | | | | |
| | | AAACTACCTGAACGC | | | | | | | |
| | | GGCACCGAGTCGGTG | | | | | | | |
| | | C | | | | | | | |
| 4241 | L2_e8_ | GTTTAAGAGCTAGAA | 6759 | GTTTAAGAGCTAGA | 6909 | CTGGAAACGGGTGC | Stem loop | 8 | 92 |
| | 7 | ATAGCAAGTTTAAAT | | AATAGCAAGTTTAA | | GACGCGGCACCGAG | 2 | | |
| | | AAGGCTAGTCCGTTAT | | ATAAGGCTAGTCCG | | TCGGTGC | | | |
| | | CAGCGTTGCACCTGG | | TTATCAGCGTtgcac | | | | | |
| | | AAACGGGTGCGACGC | | | | | | | |
| | | GGCACCGAGTCGGTG | | | | | | | |
| | | C | | | | | | | |
| 4242 | L2_e8_ | GTTTAAGAGCTAGAA | 6760 | GTTTAAGAGCTAGA | 6910 | CGGGAAACTGTAGA | Stem loop | 8 | 92 |
| | 8 | ATAGCAAGTTTAAAT | | AATAGCAAGTTTAA | | GACGCGGCACCGAG | 2 | | |
| | | AAGGCTAGTCCGTTAT | | ATAAGGCTAGTCCG | | TCGGTGC | | | |
| | | CAGCGTCTCTACGGG | | TTATCAGCGTctcta | | | | | |
| | | AAACTGTAGAGACGC | | | | | | | |
| | | GGCACCGAGTCGGTG | | | | | | | |
| | | C | | | | | | | |
| 4243 | L2_e8_ | GTTTAAGAGCTAGAA | 6761 | GTTTAAGAGCTAGA | 6911 | TCTGAAAAGGCGGC | Stem loop | 8 | 92 |
| | 9 | ATAGCAAGTTTAAAT | | AATAGCAAGTTTAA | | GACGCGGCACCGAG | 2 | | |
| | | AAGGCTAGTCCGTTAT | | ATAAGGCTAGTCCG | | TCGGTGC | | | |
| | | CAGCGTCGCCGTCTGA | | TTATCAGCGTcgccg | | | | | |
| | | AAAGGCGGCGACGCG | | | | | | | |
| | | GCACCGAGTCGGTGC | | | | | | | |
| 4244 | L2_e8_ | GTTTAAGAGCTAGAA | 6762 | GTTTAAGAGCTAGA | 6912 | GATGAAAATCCCGT | Stem loop | 8 | 92 |
| | 10 | ATAGCAAGTTTAAAT | | AATAGCAAGTTTAA | | AACGCGGCACCGAG | 2 | | |
| | | AAGGCTAGTCCGTTAT | | ATAAGGCTAGTCCG | | TCGGTGC | | | |
| | | CAGCGTTACGGGATG | | TTATCAGCGTtacgg | | | | | |
| | | AAAATCCCGTAACGC | | | | | | | |
| | | GGCACCGAGTCGGTG | | | | | | | |
| | | C | | | | | | | |
| 4245 | L2_e8_ | GTTTAAGAGCTAGAA | 6763 | GTTTAAGAGCTAGA | 6913 | CCGGAAACGGCAGC | Stem loop | 8 | 92 |
| | 11 | ATAGCAAGTTTAAAT | | AATAGCAAGTTTAA | | TACGCGGCACCGAG | 2 | | |
| | | AAGGCTAGTCCGTTAT | | ATAAGGCTAGTCCG | | TCGGTGC | | | |
| | | CAGCGTAGCTGCCGG | | TTATCAGCGTagctg | | | | | |
| | | AAACGGCAGCTACGC | | | | | | | |
| | | GGCACCGAGTCGGTG | | | | | | | |
| | | C | | | | | | | |
| 4246 | L2_e8_ | GTTTAAGAGCTAGAA | 6764 | GTTTAAGAGCTAGA | 6914 | TCTGAAAAGGCCAG | Stem loop | 8 | 92 |
| | 12 | ATAGCAAGTTTAAAT | | AATAGCAAGTTTAA | | TACGCGGCACCGAG | 2 | | |
| | | AAGGCTAGTCCGTTAT | | ATAAGGCTAGTCCG | | TCGGTGC | | | |
| | | CAGCGTACTGGTCTGA | | TTATCAGCGTactgg | | | | | |
| | | AAAGGCCAGTACGCG | | | | | | | |
| | | GCACCGAGTCGGTGC | | | | | | | |
| 4247 | L2_e8_ | GTTTAAGAGCTAGAA | 6765 | GTTTAAGAGCTAGA | 6915 | GCAGAAATGTCAGC | Stem loop | 8 | 92 |
| | 13 | ATAGCAAGTTTAAAT | | AATAGCAAGTTTAA | | GACGCGGCACCGAG | 2 | | |
| | | AAGGCTAGTCCGTTAT | | ATAAGGCTAGTCCG | | TCGGTGC | | | |
| | | CAGCGTCGCTGGCAG | | TTATCAGCGTcgctg | | | | | |
| | | AAATGTCAGCGACGC | | | | | | | |
| | | GGCACCGAGTCGGTG | | | | | | | |
| | | C | | | | | | | |
| 4248 | L2_e8_ | GTTTAAGAGCTAGAA | 6766 | GTTTAAGAGCTAGA | 6916 | CCTGAAAAGGACAG | Stem loop | 8 | 92 |
| | 14 | ATAGCAAGTTTAAAT | | AATAGCAAGTTTAA | | GACGCGGCACCGAG | 2 | | |
| | | AAGGCTAGTCCGTTAT | | ATAAGGCTAGTCCG | | TCGGTGC | | | |
| | | CAGCGTCCTGTCCTGA | | TTATCAGCGTcctgt | | | | | |
| | | AAAGGACAGGACGCG | | | | | | | |
| | | GCACCGAGTCGGTGC | | | | | | | |
| 4249 | L2_e8_ | GTTTAAGAGCTAGAA | 6767 | GTTTAAGAGCTAGA | 6917 | GAGGAAACTCGGTA | Stem loop | 8 | 92 |
| | 15 | ATAGCAAGTTTAAAT | | AATAGCAAGTTTAA | | TACGCGGCACCGAG | 2 | | |
| | | AAGGCTAGTCCGTTAT | | ATAAGGCTAGTCCG | | TCGGTGC | | | |
| | | CAGCGTATACCGAGG | | TTATCAGCGTatacc | | | | | |
| | | AAACTCGGTATACGC | | | | | | | |
| | | GGCACCGAGTCGGTG | | | | | | | |
| | | C | | | | | | | |
| 4250 | L2_e8_ | GTTTAAGAGCTAGAA | 6768 | GTTTAAGAGCTAGA | 6918 | CGCGAAAGCGACCT | Stem loop | 8 | 92 |
| | 16 | ATAGCAAGTTTAAAT | | AATAGCAAGTTTAA | | AACGCGGCACCGAG | 2 | | |
| | | AAGGCTAGTCCGTTAT | | ATAAGGCTAGTCCG | | TCGGTGC | | | |
| | | CAGCGTTAGGTCGCG | | TTATCAGCGTtaggt | | | | | |
| | | AAAGCGACCTAACGC | | | | | | | |
| | | GGCACCGAGTCGGTG | | | | | | | |
| | | C | | | | | | | |
| 4251 | L2_e8_ | GTTTAAGAGCTAGAA | 6769 | GTTTAAGAGCTAGA | 6919 | AACGAAAGTTTCGG | Stem loop | 8 | 92 |
| | 17 | ATAGCAAGTTTAAAT | | AATAGCAAGTTTAA | | CACGCGGCACCGAG | 2 | | |
| | | AAGGCTAGTCCGTTAT | | ATAAGGCTAGTCCG | | TCGGTGC | | | |
| | | CAGCGTGCTGAAACG | | TTATCAGCGTgctga | | | | | |
| | | AAAGTTTCGGCACGC | | | | | | | |
| | | GGCACCGAGTCGGTG | | | | | | | |
| | | C | | | | | | | |
| 4252 | L2_e8_ | GTTTAAGAGCTAGAA | 6770 | GTTTAAGAGCTAGA | 6920 | AAAGAAATTTGCCG | Stem loop | 8 | 92 |
| | 18 | ATAGCAAGTTTAAAT | | AATAGCAAGTTTAA | | TACGCGGCACCGAG | 2 | | |
| | | AAGGCTAGTCCGTTAT | | ATAAGGCTAGTCCG | | TCGGTGC | | | |
| | | CAGCGTACGGCAAAG | | TTATCAGCGTacggc | | | | | |
| | | AAATTTGCCGTACGCG | | | | | | | |
| | | GCACCGAGTCGGTGC | | | | | | | |
| 4253 | L2_e8_ | GTTTAAGAGCTAGAA | 6771 | GTTTAAGAGCTAGA | 6921 | CCTGAAAAGGCTCA | Stem loop | 8 | 92 |
| | 19 | ATAGCAAGTTTAAAT | | AATAGCAAGTTTAA | | TACGCGGCACCGAG | 2 | | |
| | | AAGGCTAGTCCGTTAT | | ATAAGGCTAGTCCG | | TCGGTGC | | | |
| | | CAGCGTGTGAGCCTG | | TTATCAGCGTgtgag | | | | | |
| | | AAAAGGCTCATACGC | | | | | | | |
| | | GGCACCGAGTCGGTG | | | | | | | |
| | | C | | | | | | | |
| 4254 | L2_e8_ | GTTTAAGAGCTAGAA | 6772 | GTTTAAGAGCTAGA | 6922 | AAAGAAATTTTGCC | Stem loop | 8 | 92 |
| | 20 | ATAGCAAGTTTAAAT | | AATAGCAAGTTTAA | | GACGCGGCACCGAG | 2 | | |
| | | AAGGCTAGTCCGTTAT | | ATAAGGCTAGTCCG | | TCGGTGC | | | |
| | | CAGCGTCGGCAAAAG | | TTATCAGCGTcggca | | | | | |
| | | AAATTTTGCCGACGCG | | | | | | | |
| | | GCACCGAGTCGGTGC | | | | | | | |
| 4255 | L2_e8_ | GTTTAAGAGCTAGAA | 6773 | GTTTAAGAGCTAGA | 6923 | AGCGAAAGTTAGCG | Stem loop | 8 | 92 |
| | 21 | ATAGCAAGTTTAAAT | | AATAGCAAGTTTAA | | GACGCGGCACCGAG | 2 | | |
| | | AAGGCTAGTCCGTTAT | | ATAAGGCTAGTCCG | | TCGGTGC | | | |
| | | CAGCGTCCGCTAGCG | | TTATCAGCGTccgct | | | | | |
| | | AAAGTTAGCGGACGC | | | | | | | |
| | | GGCACCGAGTCGGTG | | | | | | | |
| | | C | | | | | | | |
| 4256 | L2_e8_ | GTTTAAGAGCTAGAA | 6774 | GTTTAAGAGCTAGA | 6924 | ATCGAAAGATGGTG | Stem loop | 8 | 92 |
| | 22 | ATAGCAAGTTTAAAT | | AATAGCAAGTTTAA | | GACGCGGCACCGAG | 2 | | |
| | | AAGGCTAGTCCGTTAT | | ATAAGGCTAGTCCG | | TCGGTGC | | | |
| | | CAGCGTCCACCATCG | | TTATCAGCGTccacc | | | | | |
| | | AAAGATGGTGGACGC | | | | | | | |
| | | GGCACCGAGTCGGTG | | | | | | | |
| | | C | | | | | | | |
| 4257 | L2_e8_ | GTTTAAGAGCTAGAA | 6775 | GTTTAAGAGCTAGA | 6925 | TGGGAAACCGGGAC | Stem loop | 8 | 92 |
| | 23 | ATAGCAAGTTTAAAT | | AATAGCAAGTTTAA | | TACGCGGCACCGAG | 2 | | |
| | | AAGGCTAGTCCGTTAT | | ATAAGGCTAGTCCG | | TCGGTGC | | | |
| | | CAGCGTAGTCCTGGG | | TTATCAGCGTagtcc | | | | | |
| | | AAACCGGGACTACGC | | | | | | | |
| | | GGCACCGAGTCGGTG | | | | | | | |
| | | C | | | | | | | |
| 4258 | L2_e8_ | GTTTAAGAGCTAGAA | 6776 | GTTTAAGAGCTAGA | 6926 | TACGAAAGTAATGC | Stem loop | 8 | 92 |
| | 24 | ATAGCAAGTTTAAAT | | AATAGCAAGTTTAA | | GACGCGGCACCGAG | 2 | | |
| | | AAGGCTAGTCCGTTAT | | ATAAGGCTAGTCCG | | TCGGTGC | | | |
| | | CAGCGTCGCATTACG | | TTATCAGCGTcgcat | | | | | |
| | | AAAGTAATGCGACGC | | | | | | | |
| | | GGCACCGAGTCGGTG | | | | | | | |
| | | C | | | | | | | |
| 4259 | L2_e8_ | GTTTAAGAGCTAGAA | 6777 | GTTTAAGAGCTAGA | 6927 | CACGAAAGTGTCAT | Stem loop | 8 | 92 |
| | 25 | ATAGCAAGTTTAAAT | | AATAGCAAGTTTAA | | CACGCGGCACCGAG | 2 | | |
| | | AAGGCTAGTCCGTTAT | | ATAAGGCTAGTCCG | | TCGGTGC | | | |
| | | CAGCGTGGTGACACG | | TTATCAGCGTggtga | | | | | |
| | | AAAGTGTCATCACGC | | | | | | | |
| | | GGCACCGAGTCGGTG | | | | | | | |
| | | C | | | | | | | |
| 4260 | T_e1a_ | GTTTAAGAGCCCGGA | 6778 | GTTTAAGAG | 6928 | CCCGGAAACGGGCA | Tetraloop | 1 | 78 |
| | 1 | AACGGGCAAGTTTAA | | | | AGTTTAAATAAGGC | | | |
| | | ATAAGGCTAGTCCGTT | | | | TAGTCCGTTATCAAC | | | |
| | | ATCAACTTGAAAAAG | | | | TTGAAAAAGTGGCA | | | |
| | | TGGCACCGAGTCGGT | | | | CCGAGTCGGTGC | | | |
| | | GC | | | | | | | |
| 4261 | T_e1a_ | GTTTAAGAGCCCCGA | 6779 | GTTTAAGAG | 6929 | CCCCGAAAGGGGCA | Tetraloop | 1 | 78 |
| | 2 | AAGGGGCAAGTTTAA | | | | AGTTTAAATAAGGC | | | |
| | | ATAAGGCTAGTCCGTT | | | | TAGTCCGTTATCAAC | | | |
| | | ATCAACTTGAAAAAG | | | | TTGAAAAAGTGGCA | | | |
| | | TGGCACCGAGTCGGT | | | | CCGAGTCGGTGC | | | |
| | | GC | | | | | | | |
| 4262 | T_e1a_ | GTTTAAGAGCCGGGA | 6780 | GTTTAAGAG | 6930 | CCGGGAAACCGGCA | Tetraloop | 1 | 78 |
| | 3 | AACCGGCAAGTTTAA | | | | AGTTTAAATAAGGC | | | |
| | | ATAAGGCTAGTCCGTT | | | | TAGTCCGTTATCAAC | | | |
| | | ATCAACTTGAAAAAG | | | | TTGAAAAAGTGGCA | | | |
| | | TGGCACCGAGTCGGT | | | | CCGAGTCGGTGC | | | |
| | | GC | | | | | | | |
| 4263 | T_e1a_ | GTTTAAGAGCCGCGA | 6781 | GTTTAAGAG | 6931 | CCGCGAAAGCGGCA | Tetraloop | 1 | 78 |
| | 4 | AAGCGGCAAGTTTAA | | | | AGTTTAAATAAGGC | | | |
| | | ATAAGGCTAGTCCGTT | | | | TAGTCCGTTATCAAC | | | |
| | | ATCAACTTGAAAAAG | | | | TTGAAAAAGTGGCA | | | |
| | | TGGCACCGAGTCGGT | | | | CCGAGTCGGTGC | | | |
| | | GC | | | | | | | |
| 4264 | T_e1a_ | GTTTAAGAGCGGCGA | 6782 | GTTTAAGAG | 6932 | CGGCGAAAGCCGCA | Tetraloop | 1 | 78 |
| | 5 | AAGCCGCAAGTTTAA | | | | AGTTTAAATAAGGC | | | |
| | | ATAAGGCTAGTCCGTT | | | | TAGTCCGTTATCAAC | | | |
| | | ATCAACTTGAAAAAG | | | | TTGAAAAAGTGGCA | | | |
| | | TGGCACCGAGTCGGT | | | | CCGAGTCGGTGC | | | |
| | | GC | | | | | | | |
| 4265 | T_e1a_ | GTTTAAGAGCGCCGA | 6783 | GTTTAAGAG | 6933 | CGCCGAAAGGCGCA | Tetraloop | 1 | 78 |
| | 6 | AAGGCGCAAGTTTAA | | | | AGTTTAAATAAGGC | | | |
| | | ATAAGGCTAGTCCGTT | | | | TAGTCCGTTATCAAC | | | |
| | | ATCAACTTGAAAAAG | | | | TTGAAAAAGTGGCA | | | |
| | | TGGCACCGAGTCGGT | | | | CCGAGTCGGTGC | | | |
| | | GC | | | | | | | |
| 4266 | T_e1a_ | GTTTAAGAGCGCGGA | 6784 | GTTTAAGAG | 6934 | CGCGGAAACGCGCA | Tetraloop | 1 | 78 |
| | 7 | AACGCGCAAGTTTAA | | | | AGTTTAAATAAGGC | | | |
| | | ATAAGGCTAGTCCGTT | | | | TAGTCCGTTATCAAC | | | |
| | | ATCAACTTGAAAAAG | | | | TTGAAAAAGTGGCA | | | |
| | | TGGCACCGAGTCGGT | | | | CCGAGTCGGTGC | | | |
| | | GC | | | | | | | |
| 4267 | T_e1a_ | GTTTAAGAGCGGGGA | 6785 | GTTTAAGAG | 6935 | CGGGGAAACCCGCA | Tetraloop | 1 | 78 |
| | 8 | AACCCGCAAGTTTAA | | | | AGTTTAAATAAGGC | | | |
| | | ATAAGGCTAGTCCGTT | | | | TAGTCCGTTATCAAC | | | |
| | | ATCAACTTGAAAAAG | | | | TTGAAAAAGTGGCA | | | |
| | | TGGCACCGAGTCGGT | | | | CCGAGTCGGTGC | | | |
| | | GC | | | | | | | |
| 4268 | T_e1b_ | GTTTAAGAGCCTGGA | 6786 | GTTTAAGAG | 6936 | CCTGGAAACAGGCA | Tetraloop | 1 | 78 |
| | 1 | AACAGGCAAGTTTAA | | | | AGTTTAAATAAGGC | | | |
| | | ATAAGGCTAGTCCGTT | | | | TAGTCCGTTATCAAC | | | |
| | | ATCAACTTGAAAAAG | | | | TTGAAAAAGTGGCA | | | |
| | | TGGCACCGAGTCGGT | | | | CCGAGTCGGTGC | | | |
| | | GC | | | | | | | |
| 4269 | T_e1b_ | GTTTAAGAGCGAGGA | 6787 | GTTTAAGAG | 6937 | CGAGGAAACTCGCA | Tetraloop | 1 | 78 |
| | 2 | AACTCGCAAGTTTAA | | | | AGTTTAAATAAGGC | | | |
| | | ATAAGGCTAGTCCGTT | | | | TAGTCCGTTATCAAC | | | |
| | | ATCAACTTGAAAAAG | | | | TTGAAAAAGTGGCA | | | |
| | | TGGCACCGAGTCGGT | | | | CCGAGTCGGTGC | | | |
| | | GC | | | | | | | |
| 4270 | T_e1b_ | GTTTAAGAGCGTCGA | 6788 | GTTTAAGAG | 6938 | CGTCGAAAGACGCA | Tetraloop | 1 | 78 |
| | 3 | AAGACGCAAGTTTAA | | | | AGTTTAAATAAGGC | | | |
| | | ATAAGGCTAGTCCGTT | | | | TAGTCCGTTATCAAC | | | |
| | | ATCAACTTGAAAAAG | | | | TTGAAAAAGTGGCA | | | |
| | | TGGCACCGAGTCGGT | | | | CCGAGTCGGTGC | | | |
| | | GC | | | | | | | |
| 4271 | T_e1b_ | GTTTAAGAGCAGCGA | 6789 | GTTTAAGAG | 6939 | CAGCGAAAGCTGCA | Tetraloop | 1 | 78 |
| | 4 | AAGCTGCAAGTTTAA | | | | AGTTTAAATAAGGC | | | |
| | | ATAAGGCTAGTCCGTT | | | | TAGTCCGTTATCAAC | | | |
| | | ATCAACTTGAAAAAG | | | | TTGAAAAAGTGGCA | | | |
| | | TGGCACCGAGTCGGT | | | | CCGAGTCGGTGC | | | |
| | | GC | | | | | | | |
| 4272 | T_e1b_ | GTTTAAGAGCCGGGA | 6790 | GTTTAAGAG | 6930 | CCGGGAAACCGGCA | Tetraloop | 1 | 78 |
| | 5 | AACCGGCAAGTTTAA | | | | AGTTTAAATAAGGC | | | |
| | | ATAAGGCTAGTCCGTT | | | | TAGTCCGTTATCAAC | | | |
| | | ATCAACTTGAAAAAG | | | | TTGAAAAAGTGGCA | | | |
| | | TGGCACCGAGTCGGT | | | | CCGAGTCGGTGC | | | |
| | | GC | | | | | | | |
| 4273 | T_e1b_ | GTTTAAGAGCCGTGA | 6791 | GTTTAAGAG | 6940 | CCGTGAAAACGGCA | Tetraloop | 1 | 78 |
| | 6 | AAACGGCAAGTTTAA | | | | AGTTTAAATAAGGC | | | |
| | | ATAAGGCTAGTCCGTT | | | | TAGTCCGTTATCAAC | | | |
| | | ATCAACTTGAAAAAG | | | | TTGAAAAAGTGGCA | | | |
| | | TGGCACCGAGTCGGT | | | | CCGAGTCGGTGC | | | |
| | | GC | | | | | | | |
| 4274 | T_e1b_ | GTTTAAGAGCTGGGA | 6792 | GTTTAAGAG | 6941 | CTGGGAAACCAGCA | Tetraloop | 1 | 78 |
| | 7 | AACCAGCAAGTTTAA | | | | AGTTTAAATAAGGC | | | |
| | | ATAAGGCTAGTCCGTT | | | | TAGTCCGTTATCAAC | | | |
| | | ATCAACTTGAAAAAG | | | | TTGAAAAAGTGGCA | | | |
| | | TGGCACCGAGTCGGT | | | | CCGAGTCGGTGC | | | |
| | | GC | | | | | | | |
| 4275 | T_e1b_ | GTTTAAGAGCCCTGA | 6793 | GTTTAAGAG | 6942 | CCCTGAAAAGGGCA | Tetraloop | 1 | 78 |
| | 8 | AAAGGGCAAGTTTAA | | | | AGTTTAAATAAGGC | | | |
| | | ATAAGGCTAGTCCGTT | | | | TAGTCCGTTATCAAC | | | |
| | | ATCAACTTGAAAAAG | | | | TTGAAAAAGTGGCA | | | |
| | | TGGCACCGAGTCGGT | | | | CCGAGTCGGTGC | | | |
| | | GC | | | | | | | |
| 4276 | T_e1b_ | GTTTAAGAGCGACGA | 6794 | GTTTAAGAG | 6943 | CGACGAAAGTCGCA | Tetraloop | 1 | 78 |
| | 9 | AAGTCGCAAGTTTAA | | | | AGTTTAAATAAGGC | | | |
| | | ATAAGGCTAGTCCGTT | | | | TAGTCCGTTATCAAC | | | |
| | | ATCAACTTGAAAAAG | | | | TTGAAAAAGTGGCA | | | |
| | | TGGCACCGAGTCGGT | | | | CCGAGTCGGTGC | | | |
| | | GC | | | | | | | |
| 4277 | T_e1b_ | GTTTAAGAGCGGAGA | 6795 | GTTTAAGAG | 6944 | CGGAGAAATCCGCA | Tetraloop | 1 | 78 |
| | 10 | AATCCGCAAGTTTAA | | | | AGTTTAAATAAGGC | | | |
| | | ATAAGGCTAGTCCGTT | | | | TAGTCCGTTATCAAC | | | |
| | | ATCAACTTGAAAAAG | | | | TTGAAAAAGTGGCA | | | |
| | | TGGCACCGAGTCGGT | | | | CCGAGTCGGTGC | | | |
| | | GC | | | | | | | |
| 4278 | T_e1b_ | GTTTAAGAGCACCGA | 6796 | GTTTAAGAG | 6945 | CACCGAAAGGTGCA | Tetraloop | 1 | 78 |
| | 11 | AAGGTGCAAGTTTAA | | | | AGTTTAAATAAGGC | | | |
| | | ATAAGGCTAGTCCGTT | | | | TAGTCCGTTATCAAC | | | |
| | | ATCAACTTGAAAAAG | | | | TTGAAAAAGTGGCA | | | |
| | | TGGCACCGAGTCGGT | | | | CCGAGTCGGTGC | | | |
| | | GC | | | | | | | |
| 4279 | T_e1b_ | GTTTAAGAGCAGGGA | 6797 | GTTTAAGAG | 6946 | CAGGGAAACCTGCA | Tetraloop | 1 | 78 |
| | 12 | AACCTGCAAGTTTAA | | | | AGTTTAAATAAGGC | | | |
| | | ATAAGGCTAGTCCGTT | | | | TAGTCCGTTATCAAC | | | |
| | | ATCAACTTGAAAAAG | | | | TTGAAAAAGTGGCA | | | |
| | | TGGCACCGAGTCGGT | | | | CCGAGTCGGTGC | | | |
| | | GC | | | | | | | |
| 4280 | T_e1b_ | GTTTAAGAGCGGGGA | 6798 | GTTTAAGAG | 6947 | CGGGGAAATCCGCA | Tetraloop | 1 | 78 |
| | 13 | AATCCGCAAGTTTAA | | | | AGTTTAAATAAGGC | | | |
| | | ATAAGGCTAGTCCGTT | | | | TAGTCCGTTATCAAC | | | |
| | | ATCAACTTGAAAAAG | | | | TTGAAAAAGTGGCA | | | |
| | | TGGCACCGAGTCGGT | | | | CCGAGTCGGTGC | | | |
| | | GC | | | | | | | |
| 4452 | T_e1b_ | GTTTAAGAGCGGGGA | 6799 | GTTTAAGAG | 6948 | CGGGGAAATCCGCA | Tetraloop | 1 | 78 |
| | 13_SL2 | AATCCGCAAGTTTAA | | | | AGTTTAAATAAGGC | | | |
| | | ATAAGGCTAGTCCGTT | | | | TAGTCCGTTATCAGC | | | |
| | | ATCAGCGTGAAAACG | | | | GTGAAAACGCGGCA | | | |
| | | CGGCACCGAGTCGGT | | | | CCGAGTCGGTGC | | | |
| | | GC | | | | | | | |
| 4281 | T_e1b_ | GTTTAAGAGCCGCGA | 6800 | GTTTAAGAG | 6931 | CCGCGAAAGCGGCA | Tetraloop | 1 | 78 |
| | 14 | AAGCGGCAAGTTTAA | | | | AGTTTAAATAAGGC | | | |
| | | ATAAGGCTAGTCCGTT | | | | TAGTCCGTTATCAAC | | | |
| | | ATCAACTTGAAAAAG | | | | TTGAAAAAGTGGCA | | | |
| | | TGGCACCGAGTCGGT | | | | CCGAGTCGGTGC | | | |
| | | GC | | | | | | | |
| 4282 | T_e1b_ | GTTTAAGAGCCCCGA | 6801 | GTTTAAGAG | 6929 | CCCCGAAAGGGGCA | Tetraloop | 1 | 78 |
| | 15 | AAGGGGCAAGTTTAA | | | | AGTTTAAATAAGGC | | | |
| | | ATAAGGCTAGTCCGTT | | | | TAGTCCGTTATCAAC | | | |
| | | ATCAACTTGAAAAAG | | | | TTGAAAAAGTGGCA | | | |
| | | TGGCACCGAGTCGGT | | | | CCGAGTCGGTGC | | | |
| | | GC | | | | | | | |
| 4283 | T_e1b_ | GTTTAAGAGCCTCGA | 6802 | GTTTAAGAG | 6949 | CCTCGAAAGGGGCA | Tetraloop | 1 | 78 |
| | 16 | AAGGGGCAAGTTTAA | | | | AGTTTAAATAAGGC | | | |
| | | ATAAGGCTAGTCCGTT | | | | TAGTCCGTTATCAAC | | | |
| | | ATCAACTTGAAAAAG | | | | TTGAAAAAGTGGCA | | | |
| | | TGGCACCGAGTCGGT | | | | CCGAGTCGGTGC | | | |
| | | GC | | | | | | | |
| 4284 | T_e1b_ | GTTTAAGAGCGGGGA | 6803 | GTTTAAGAG | 6935 | CGGGGAAACCCGCA | Tetraloop | 1 | 78 |
| | 17 | AACCCGCAAGTTTAA | | | | AGTTTAAATAAGGC | | | |
| | | ATAAGGCTAGTCCGTT | | | | TAGTCCGTTATCAAC | | | |
| | | ATCAACTTGAAAAAG | | | | TTGAAAAAGTGGCA | | | |
| | | TGGCACCGAGTCGGT | | | | CCGAGTCGGTGC | | | |
| | | GC | | | | | | | |
| 4285 | T_e1b_ | GTTTAAGAGCGCGGA | 6804 | GTTTAAGAG | 6934 | CGCGGAAACGCGCA | Tetraloop | 1 | 78 |
| | 18 | AACGCGCAAGTTTAA | | | | AGTTTAAATAAGGC | | | |
| | | ATAAGGCTAGTCCGTT | | | | TAGTCCGTTATCAAC | | | |
| | | ATCAACTTGAAAAAG | | | | TTGAAAAAGTGGCA | | | |
| | | TGGCACCGAGTCGGT | | | | CCGAGTCGGTGC | | | |
| | | GC | | | | | | | |
| 4286 | T_e1b_ | GTTTAAGAGCTGCGA | 6805 | GTTTAAGAG | 6950 | CTGCGAAAGCAGCA | Tetraloop | 1 | 78 |
| | 19 | AAGCAGCAAGTTTAA | | | | AGTTTAAATAAGGC | | | |
| | | ATAAGGCTAGTCCGTT | | | | TAGTCCGTTATCAAC | | | |
| | | ATCAACTTGAAAAAG | | | | TTGAAAAAGTGGCA | | | |
| | | TGGCACCGAGTCGGT | | | | CCGAGTCGGTGC | | | |
| | | GC | | | | | | | |
| 4287 | T_e1b_ | GTTTAAGAGCACGGA | 6806 | GTTTAAGAG | 6951 | CACGGAAACGTGCA | Tetraloop | 1 | 78 |
| | 20 | AACGTGCAAGTTTAA | | | | AGTTTAAATAAGGC | | | |
| | | ATAAGGCTAGTCCGTT | | | | TAGTCCGTTATCAAC | | | |
| | | ATCAACTTGAAAAAG | | | | TTGAAAAAGTGGCA | | | |
| | | TGGCACCGAGTCGGT | | | | CCGAGTCGGTGC | | | |
| | | GC | | | | | | | |
| 4288 | T_e1b_ | GTTTAAGAGCGTGGA | 6807 | GTTTAAGAG | 6952 | CGTGGAAACACGCA | Tetraloop | 1 | 78 |
| | 21 | AACACGCAAGTTTAA | | | | AGTTTAAATAAGGC | | | |
| | | ATAAGGCTAGTCCGTT | | | | TAGTCCGTTATCAAC | | | |
| | | ATCAACTTGAAAAAG | | | | TTGAAAAAGTGGCA | | | |
| | | TGGCACCGAGTCGGT | | | | CCGAGTCGGTGC | | | |
| | | GC | | | | | | | |
| 4289 | T_e1b_ | GTTTAAGAGCGCCGA | 6808 | GTTTAAGAG | 6933 | CGCCGAAAGGCGCA | Tetraloop | 1 | 78 |
| | 22 | AAGGCGCAAGTTTAA | | | | AGTTTAAATAAGGC | | | |
| | | ATAAGGCTAGTCCGTT | | | | TAGTCCGTTATCAAC | | | |
| | | ATCAACTTGAAAAAG | | | | TTGAAAAAGTGGCA | | | |
| | | TGGCACCGAGTCGGT | | | | CCGAGTCGGTGC | | | |
| | | GC | | | | | | | |
| 4290 | T_e1b_ | GTTTAAGAGCTCCGA | 6809 | GTTTAAGAG | 6953 | CTCCGAAAGGGGCA | Tetraloop | 1 | 78 |
| | 23 | AAGGGGCAAGTTTAA | | | | AGTTTAAATAAGGC | | | |
| | | ATAAGGCTAGTCCGTT | | | | TAGTCCGTTATCAAC | | | |
| | | ATCAACTTGAAAAAG | | | | TTGAAAAAGTGGCA | | | |
| | | TGGCACCGAGTCGGT | | | | CCGAGTCGGTGC | | | |
| | | GC | | | | | | | |
| 4291 | T_e1b_ | GTTTAAGAGCGGCGA | 6810 | GTTTAAGAG | 6932 | CGGCGAAAGCCGCA | Tetraloop | 1 | 78 |
| | 24 | AAGCCGCAAGTTTAA | | | | AGTTTAAATAAGGC | | | |
| | | ATAAGGCTAGTCCGTT | | | | TAGTCCGTTATCAAC | | | |
| | | ATCAACTTGAAAAAG | | | | TTGAAAAAGTGGCA | | | |
| | | TGGCACCGAGTCGGT | | | | CCGAGTCGGTGC | | | |
| | | GC | | | | | | | |
| 4292 | T_e2_1 | GTTTAAGAGCCACCG | 6811 | GTTTAAGAGC | 6954 | CACCGAAAGGTGGC | Tetraloop | 2 | 80 |
| | | AAAGGTGGCAAGTTT | | | | AAGTTTAAATAAGG | | | |
| | | AAATAAGGCTAGTCC | | | | CTAGTCCGTTATCAA | | | |
| | | GTTATCAACTTGAAAA | | | | CTTGAAAAAGTGGC | | | |
| | | AGTGGCACCGAGTCG | | | | ACCGAGTCGGTGC | | | |
| | | GTGC | | | | | | | |
| 4293 | T_e2_2 | GTTTAAGAGCCGTCG | 6812 | GTTTAAGAGC | 6955 | CGTCGAAAGACGGC | Tetraloop | 2 | 80 |
| | | AAAGACGGCAAGTTT | | | | AAGTTTAAATAAGG | | | |
| | | AAATAAGGCTAGTCC | | | | CTAGTCCGTTATCAA | | | |
| | | GTTATCAACTTGAAAA | | | | CTTGAAAAAGTGGC | | | |
| | | AGTGGCACCGAGTCG | | | | ACCGAGTCGGTGC | | | |
| | | GTGC | | | | | | | |
| 4294 | T_e2_3 | GTTTAAGAGCCAGCG | 6813 | GTTTAAGAGC | 6956 | CAGCGAAAGCTGGC | Tetraloop | 2 | 80 |
| | | AAAGCTGGCAAGTTT | | | | AAGTTTAAATAAGG | | | |
| | | AAATAAGGCTAGTCC | | | | CTAGTCCGTTATCAA | | | |
| | | GTTATCAACTTGAAAA | | | | CTTGAAAAAGTGGC | | | |
| | | AGTGGCACCGAGTCG | | | | ACCGAGTCGGTGC | | | |
| | | GTGC | | | | | | | |
| 4295 | T_e2_4 | GTTTAAGAGCGCGGG | 6814 | GTTTAAGAGC | 6957 | GCGGGAAACCGCGC | Tetraloop | 2 | 80 |
| | | AAACCGCGCAAGTTT | | | | AAGTTTAAATAAGG | | | |
| | | AAATAAGGCTAGTCC | | | | CTAGTCCGTTATCAA | | | |
| | | GTTATCAACTTGAAAA | | | | CTTGAAAAAGTGGC | | | |
| | | AGTGGCACCGAGTCG | | | | ACCGAGTCGGTGC | | | |
| | | GTGC | | | | | | | |
| 4296 | T_e2_5 | GTTTAAGAGCTCGCG | 6815 | GTTTAAGAGC | 6958 | TCGCGAAAGCGAGC | Tetraloop | 2 | 80 |
| | | AAAGCGAGCAAGTTT | | | | AAGTTTAAATAAGG | | | |
| | | AAATAAGGCTAGTCC | | | | CTAGTCCGTTATCAA | | | |
| | | GTTATCAACTTGAAAA | | | | CTTGAAAAAGTGGC | | | |
| | | AGTGGCACCGAGTCG | | | | ACCGAGTCGGTGC | | | |
| | | GTGC | | | | | | | |
| 4297 | T_e2_6 | GTTTAAGAGCTCGGG | 6816 | GTTTAAGAGC | 6959 | TCGGGAAACCGAGC | Tetraloop | 2 | 80 |
| | | AAACCGAGCAAGTTT | | | | AAGTTTAAATAAGG | | | |
| | | AAATAAGGCTAGTCC | | | | CTAGTCCGTTATCAA | | | |
| | | GTTATCAACTTGAAAA | | | | CTTGAAAAAGTGGC | | | |
| | | AGTGGCACCGAGTCG | | | | ACCGAGTCGGTGC | | | |
| | | GTGC | | | | | | | |
| 4298 | T_e2_7 | GTTTAAGAGCCCCTGA | 6817 | GTTTAAGAGC | 6960 | CCCTGAAAGGGGGC | Tetraloop | 2 | 80 |
| | | AAGGGGGCAAGTTTA | | | | AAGTTTAAATAAGG | | | |
| | | AATAAGGCTAGTCCG | | | | CTAGTCCGTTATCAA | | | |
| | | TTATCAACTTGAAAAA | | | | CTTGAAAAAGTGGC | | | |
| | | GTGGCACCGAGTCGG | | | | ACCGAGTCGGTGC | | | |
| | | TGC | | | | | | | |
| 4299 | T_e2_8 | GTTTAAGAGCCGTGG | 6818 | GTTTAAGAGC | 6961 | CGTGGAAACGCGGC | Tetraloop | 2 | 80 |
| | | AAACGCGGCAAGTTT | | | | AAGTTTAAATAAGG | | | |
| | | AAATAAGGCTAGTCC | | | | CTAGTCCGTTATCAA | | | |
| | | GTTATCAACTTGAAAA | | | | CTTGAAAAAGTGGC | | | |
| | | AGTGGCACCGAGTCG | | | | ACCGAGTCGGTGC | | | |
| | | GTGC | | | | | | | |
| 4300 | T_e2_9 | GTTTAAGAGCGACCG | 6819 | GTTTAAGAGC | 6962 | GACCGAAAGGTCGC | Tetraloop | 2 | 80 |
| | | AAAGGTCGCAAGTTT | | | | AAGTTTAAATAAGG | | | |
| | | AAATAAGGCTAGTCC | | | | CTAGTCCGTTATCAA | | | |
| | | GTTATCAACTTGAAAA | | | | CTTGAAAAAGTGGC | | | |
| | | AGTGGCACCGAGTCG | | | | ACCGAGTCGGTGC | | | |
| | | GTGC | | | | | | | |
| 4301 | T_e2_10 | GTTTAAGAGCACGCG | 6820 | GTTTAAGAGC | 6963 | ACGCGAAAGCGTGC | Tetraloop | 2 | 80 |
| | | AAAGCGTGCAAGTTT | | | | AAGTTTAAATAAGG | | | |
| | | AAATAAGGCTAGTCC | | | | CTAGTCCGTTATCAA | | | |
| | | GTTATCAACTTGAAAA | | | | CTTGAAAAAGTGGC | | | |
| | | AGTGGCACCGAGTCG | | | | ACCGAGTCGGTGC | | | |
| | | GTGC | | | | | | | |
| 4302 | T_e2_11 | GTTTAAGAGCGAGCG | 6821 | GTTTAAGAGC | 6964 | GAGCGAAAGCTCGC | Tetraloop | 2 | 80 |
| | | AAAGCTCGCAAGTTT | | | | AAGTTTAAATAAGG | | | |
| | | AAATAAGGCTAGTCC | | | | CTAGTCCGTTATCAA | | | |
| | | GTTATCAACTTGAAAA | | | | CTTGAAAAAGTGGC | | | |
| | | AGTGGCACCGAGTCG | | | | ACCGAGTCGGTGC | | | |
| | | GTGC | | | | | | | |
| 4303 | T_e2_12 | GTTTAAGAGCTCCGG | 6822 | GTTTAAGAGC | 6965 | TCCGGAAACGGAGC | Tetraloop | 2 | 80 |
| | | AAACGGAGCAAGTTT | | | | AAGTTTAAATAAGG | | | |
| | | AAATAAGGCTAGTCC | | | | CTAGTCCGTTATCAA | | | |
| | | GTTATCAACTTGAAAA | | | | CTTGAAAAAGTGGC | | | |
| | | AGTGGCACCGAGTCG | | | | ACCGAGTCGGTGC | | | |
| | | GTGC | | | | | | | |
| 4304 | T_e2_13 | GTTTAAGAGCGCCAG | 6823 | GTTTAAGAGC | 6966 | GCCAGAAATGGCGC | Tetraloop | 2 | 80 |
| | | AAATGGCGCAAGTTT | | | | AAGTTTAAATAAGG | | | |
| | | AAATAAGGCTAGTCC | | | | CTAGTCCGTTATCAA | | | |
| | | GTTATCAACTTGAAAA | | | | CTTGAAAAAGTGGC | | | |
| | | AGTGGCACCGAGTCG | | | | ACCGAGTCGGTGC | | | |
| | | GTGC | | | | | | | |
| 4305 | T_e2_14 | GTTTAAGAGCCCGTG | 6824 | GTTTAAGAGC | 6967 | CCGTGAAAACGGGC | Tetraloop | 2 | 80 |
| | | AAAACGGGCAAGTTT | | | | AAGTTTAAATAAGG | | | |
| | | AAATAAGGCTAGTCC | | | | CTAGTCCGTTATCAA | | | |
| | | GTTATCAACTTGAAAA | | | | CTTGAAAAAGTGGC | | | |
| | | AGTGGCACCGAGTCG | | | | ACCGAGTCGGTGC | | | |
| | | GTGC | | | | | | | |
| 4306 | T_e2_15 | GTTTAAGAGCGTGCG | 6825 | GTTTAAGAGC | 6968 | GTGCGAAAGCACGC | Tetraloop | 2 | 80 |
| | | AAAGCACGCAAGTTT | | | | AAGTTTAAATAAGG | | | |
| | | AAATAAGGCTAGTCC | | | | CTAGTCCGTTATCAA | | | |
| | | GTTATCAACTTGAAAA | | | | CTTGAAAAAGTGGC | | | |
| | | AGTGGCACCGAGTCG | | | | ACCGAGTCGGTGC | | | |
| | | GTGC | | | | | | | |
| 4307 | T_e2_16 | GTTTAAGAGCTGCCG | 6826 | GTTTAAGAGC | 6969 | TGCCGAAAGGCGGC | Tetraloop | 2 | 80 |
| | | AAAGGCGGCAAGTTT | | | | AAGTTTAAATAAGG | | | |
| | | AAATAAGGCTAGTCC | | | | CTAGTCCGTTATCAA | | | |
| | | GTTATCAACTTGAAAA | | | | CTTGAAAAAGTGGC | | | |
| | | AGTGGCACCGAGTCG | | | | ACCGAGTCGGTGC | | | |
| | | GTGC | | | | | | | |
| 4308 | T_e2_17 | GTTTAAGAGCCCTGG | 6827 | GTTTAAGAGC | 6970 | CCTGGAAACAGGGC | Tetraloop | 2 | 80 |
| | | AAACAGGGCAAGTTT | | | | AAGTTTAAATAAGG | | | |
| | | AAATAAGGCTAGTCC | | | | CTAGTCCGTTATCAA | | | |
| | | GTTATCAACTTGAAAA | | | | CTTGAAAAAGTGGC | | | |
| | | AGTGGCACCGAGTCG | | | | ACCGAGTCGGTGC | | | |
| | | GTGC | | | | | | | |
| 4309 | T_e2_18 | GTTTAAGAGCGCTCG | 6828 | GTTTAAGAGC | 6971 | GCTCGAAAGGGCGC | Tetraloop | 2 | 80 |
| | | AAAGGGCGCAAGTTT | | | | AAGTTTAAATAAGG | | | |
| | | AAATAAGGCTAGTCC | | | | CTAGTCCGTTATCAA | | | |
| | | GTTATCAACTTGAAAA | | | | CTTGAAAAAGTGGC | | | |
| | | AGTGGCACCGAGTCG | | | | ACCGAGTCGGTGC | | | |
| | | GTGC | | | | | | | |
| 4310 | T_e2_19 | GTTTAAGAGCGCCCG | 6829 | GTTTAAGAGC | 6972 | GCCCGAAAGGGTGC | Tetraloop | 2 | 80 |
| | | AAAGGGTGCAAGTTT | | | | AAGTTTAAATAAGG | | | |
| | | AAATAAGGCTAGTCC | | | | CTAGTCCGTTATCAA | | | |
| | | GTTATCAACTTGAAAA | | | | CTTGAAAAAGTGGC | | | |
| | | AGTGGCACCGAGTCG | | | | ACCGAGTCGGTGC | | | |
| | | GTGC | | | | | | | |
| 4311 | T_e2_20 | GTTTAAGAGCTGGGG | 6830 | GTTTAAGAGC | 6973 | TGGGGAAACCCGGC | Tetraloop | 2 | 80 |
| | | AAACCCGGCAAGTTT | | | | AAGTTTAAATAAGG | | | |
| | | AAATAAGGCTAGTCC | | | | CTAGTCCGTTATCAA | | | |
| | | GTTATCAACTTGAAAA | | | | CTTGAAAAAGTGGC | | | |
| | | AGTGGCACCGAGTCG | | | | ACCGAGTCGGTGC | | | |
| | | GTGC | | | | | | | |
| 4312 | T_e2_21 | GTTTAAGAGCGGTCG | 6831 | GTTTAAGAGC | 6974 | GGTCGAAAGGCCGC | Tetraloop | 2 | 80 |
| | | AAAGGCCGCAAGTTT | | | | AAGTTTAAATAAGG | | | |
| | | AAATAAGGCTAGTCC | | | | CTAGTCCGTTATCAA | | | |
| | | GTTATCAACTTGAAAA | | | | CTTGAAAAAGTGGC | | | |
| | | AGTGGCACCGAGTCG | | | | ACCGAGTCGGTGC | | | |
| | | GTGC | | | | | | | |
| 4313 | T_e2_22 | GTTTAAGAGCAGGCG | 6832 | GTTTAAGAGC | 6975 | AGGCGAAAGCCTGC | Tetraloop | 2 | 80 |
| | | AAAGCCTGCAAGTTT | | | | AAGTTTAAATAAGG | | | |
| | | AAATAAGGCTAGTCC | | | | CTAGTCCGTTATCAA | | | |
| | | GTTATCAACTTGAAAA | | | | CTTGAAAAAGTGGC | | | |
| | | AGTGGCACCGAGTCG | | | | ACCGAGTCGGTGC | | | |
| | | GTGC | | | | | | | |
| 4314 | T_e2_23 | GTTTAAGAGCGTGGG | 6833 | GTTTAAGAGC | 6976 | GTGGGAAACCGCGC | Tetraloop | 2 | 80 |
| | | AAACCGCGCAAGTTT | | | | AAGTTTAAATAAGG | | | |
| | | AAATAAGGCTAGTCC | | | | CTAGTCCGTTATCAA | | | |
| | | GTTATCAACTTGAAAA | | | | CTTGAAAAAGTGGC | | | |
| | | AGTGGCACCGAGTCG | | | | ACCGAGTCGGTGC | | | |
| | | GTGC | | | | | | | |
| 4315 | T_e2_24 | GTTTAAGAGCGCTGG | 6834 | GTTTAAGAGC | 6977 | GCTGGAAACAGCGC | Tetraloop | 2 | 80 |
| | | AAACAGCGCAAGTTT | | | | AAGTTTAAATAAGG | | | |
| | | AAATAAGGCTAGTCC | | | | CTAGTCCGTTATCAA | | | |
| | | GTTATCAACTTGAAAA | | | | CTTGAAAAAGTGGC | | | |
| | | AGTGGCACCGAGTCG | | | | ACCGAGTCGGTGC | | | |
| | | GTGC | | | | | | | |
| 4316 | T_e2_25 | GTTTAAGAGCCTGGG | 6835 | GTTTAAGAGC | 6978 | CTGGGAAACCAGGC | Tetraloop | 2 | 80 |
| | | AAACCAGGCAAGTTT | | | | AAGTTTAAATAAGG | | | |
| | | AAATAAGGCTAGTCC | | | | CTAGTCCGTTATCAA | | | |
| | | GTTATCAACTTGAAAA | | | | CTTGAAAAAGTGGC | | | |
| | | AGTGGCACCGAGTCG | | | | ACCGAGTCGGTGC | | | |
| | | GTGC | | | | | | | |
| 4317 | T_e2_26 | GTTTAAGAGCCGCAG | 6836 | GTTTAAGAGC | 6979 | CGCAGAAATGCGGC | Tetraloop | 2 | 80 |
| | | AAATGCGGCAAGTTT | | | | AAGTTTAAATAAGG | | | |
| | | AAATAAGGCTAGTCC | | | | CTAGTCCGTTATCAA | | | |
| | | GTTATCAACTTGAAAA | | | | CTTGAAAAAGTGGC | | | |
| | | AGTGGCACCGAGTCG | | | | ACCGAGTCGGTGC | | | |
| | | GTGC | | | | | | | |
| 4318 | T_e2_27 | GTTTAAGAGCCCGGG | 6837 | GTTTAAGAGC | 6980 | CCGGGAAACCGGGC | Tetraloop | 2 | 80 |
| | | AAACCGGGCAAGTTT | | | | AAGTTTAAATAAGG | | | |
| | | AAATAAGGCTAGTCC | | | | CTAGTCCGTTATCAA | | | |
| | | GTTATCAACTTGAAAA | | | | CTTGAAAAAGTGGC | | | |
| | | AGTGGCACCGAGTCG | | | | ACCGAGTCGGTGC | | | |
| | | GTGC | | | | | | | |
| 4319 | T_e2_28 | GTTTAAGAGCCCGCG | 6838 | GTTTAAGAGC | 6981 | CCGCGAAAGCGGGC | Tetraloop | 2 | 80 |
| | | AAAGCGGGCAAGTTT | | | | AAGTTTAAATAAGG | | | |
| | | AAATAAGGCTAGTCC | | | | CTAGTCCGTTATCAA | | | |
| | | GTTATCAACTTGAAAA | | | | CTTGAAAAAGTGGC | | | |
| | | AGTGGCACCGAGTCG | | | | ACCGAGTCGGTGC | | | |
| | | GTGC | | | | | | | |
| 4320 | T_e2_29 | GTTTAAGAGCAGCCG | 6839 | GTTTAAGAGC | 6982 | AGCCGAAAGGCTGC | Tetraloop | 2 | 80 |
| | | AAAGGCTGCAAGTTT | | | | AAGTTTAAATAAGG | | | |
| | | AAATAAGGCTAGTCC | | | | CTAGTCCGTTATCAA | | | |
| | | GTTATCAACTTGAAAA | | | | CTTGAAAAAGTGGC | | | |
| | | AGTGGCACCGAGTCG | | | | ACCGAGTCGGTGC | | | |
| | | GTGC | | | | | | | |
| 4321 | T_e2_30 | GTTTAAGAGCTGCCG | 6840 | GTTTAAGAGC | 6983 | TGCCGAAAGGCAGC | Tetraloop | 2 | 80 |
| | | AAAGGCAGCAAGTTT | | | | AAGTTTAAATAAGG | | | |
| | | AAATAAGGCTAGTCC | | | | CTAGTCCGTTATCAA | | | |
| | | GTTATCAACTTGAAAA | | | | CTTGAAAAAGTGGC | | | |
| | | AGTGGCACCGAGTCG | | | | ACCGAGTCGGTGC | | | |
| | | GTGC | | | | | | | |
| 4322 | T_e2_31 | GTTTAAGAGCGGACG | 6841 | GTTTAAGAGC | 6984 | GGACGAAAGTCCGC | Tetraloop | 2 | 80 |
| | | AAAGTCCGCAAGTTT | | | | AAGTTTAAATAAGG | | | |
| | | AAATAAGGCTAGTCC | | | | CTAGTCCGTTATCAA | | | |
| | | GTTATCAACTTGAAAA | | | | CTTGAAAAAGTGGC | | | |
| | | AGTGGCACCGAGTCG | | | | ACCGAGTCGGTGC | | | |
| | | GTGC | | | | | | | |
| 4323 | T_e2_32 | GTTTAAGAGCCCAGG | 6842 | GTTTAAGAGC | 6985 | CCAGGAAACTGGGC | Tetraloop | 2 | 80 |
| | | AAACTGGGCAAGTTT | | | | AAGTTTAAATAAGG | | | |
| | | AAATAAGGCTAGTCC | | | | CTAGTCCGTTATCAA | | | |
| | | GTTATCAACTTGAAAA | | | | CTTGAAAAAGTGGC | | | |
| | | AGTGGCACCGAGTCG | | | | ACCGAGTCGGTGC | | | |
| | | GTGC | | | | | | | |
| 4324 | T_e3_1 | GTTTAAGAGCGCGTG | 6843 | GTTTAAGAGCC | 6986 | GTTTAAGAGCGCGT | Tetraloop | 3 | 82 |
| | | GAAACATGCGCAAGT | | | | GGAAACATGCGCAA | | | |
| | | TTAAATAAGGCTAGTC | | | | GTTTAAATAAGGCT | | | |
| | | CGTTATCAACTTGAAA | | | | AGTCCGTTATCAACT | | | |
| | | AAGTGGCACCGAGTC | | | | TGAAAAAGTGGCAC | | | |
| | | GGTGC | | | | CGAGTCGGTGC | | | |
| 4325 | T_e3_2 | GTTTAAGAGCCTCCCG | 6844 | GTTTAAGAGCC | 6987 | TCCCGAAAGGGGGG | Tetraloop | 3 | 82 |
| | | AAAGGGGGGCAAGTT | | | | CAAGTTTAAATAAG | | | |
| | | TAAATAAGGCTAGTC | | | | GCTAGTCCGTTATCA | | | |
| | | CGTTATCAACTTGAAA | | | | ACTTGAAAAAGTGG | | | |
| | | AAGTGGCACCGAGTC | | | | CACCGAGTCGGTGC | | | |
| | | GGTGC | | | | | | | |
| 4326 | T_e3_3 | GTTTAAGAGCGCCAT | 6845 | GTTTAAGAGCC | 6988 | GTTTAAGAGCGCCA | Tetraloop | 3 | 82 |
| | | GAAAATGGCGCAAGT | | | | TGAAAATGGCGCAA | | | |
| | | TTAAATAAGGCTAGTC | | | | GTTTAAATAAGGCT | | | |
| | | CGTTATCAACTTGAAA | | | | AGTCCGTTATCAACT | | | |
| | | AAGTGGCACCGAGTC | | | | TGAAAAAGTGGCAC | | | |
| | | GGTGC | | | | CGAGTCGGTGC | | | |
| 4327 | T_e3_4 | GTTTAAGAGCGCAAC | 6846 | GTTTAAGAGCC | 6989 | GTTTAAGAGCGCAA | Tetraloop | 3 | 82 |
| | | GAAAGTTGCGCAAGT | | | | CGAAAGTTGCGCAA | | | |
| | | TTAAATAAGGCTAGTC | | | | GTTTAAATAAGGCT | | | |
| | | CGTTATCAACTTGAAA | | | | AGTCCGTTATCAACT | | | |
| | | AAGTGGCACCGAGTC | | | | TGAAAAAGTGGCAC | | | |
| | | GGTGC | | | | CGAGTCGGTGC | | | |
| 4328 | T_e3_5 | GTTTAAGAGCCCTGA | 6847 | GTTTAAGAGCC | 6990 | CTGAGAAATCAGGG | Tetraloop | 3 | 82 |
| | | GAAATCAGGGCAAGT | | | | CAAGTTTAAATAAG | | | |
| | | TTAAATAAGGCTAGTC | | | | GCTAGTCCGTTATCA | | | |
| | | CGTTATCAACTTGAAA | | | | ACTTGAAAAAGTGG | | | |
| | | AAGTGGCACCGAGTC | | | | CACCGAGTCGGTGC | | | |
| | | GGTGC | | | | | | | |
| 4329 | T_e3_6 | GTTTAAGAGCCTCCAG | 6848 | GTTTAAGAGCC | 6991 | TCCAGAAATGGAGG | Tetraloop | 3 | 82 |
| | | AAATGGAGGCAAGTT | | | | CAAGTTTAAATAAG | | | |
| | | TAAATAAGGCTAGTC | | | | GCTAGTCCGTTATCA | | | |
| | | CGTTATCAACTTGAAA | | | | ACTTGAAAAAGTGG | | | |
| | | AAGTGGCACCGAGTC | | | | CACCGAGTCGGTGC | | | |
| | | GGTGC | | | | | | | |
| 4330 | T_e3_7 | GTTTAAGAGCGCACA | 6849 | GTTTAAGAGCC | 6992 | GTTTAAGAGCGCAC | Tetraloop | 3 | 82 |
| | | GAAATGTGCGCAAGT | | | | AGAAATGTGCGCAA | | | |
| | | TTAAATAAGGCTAGTC | | | | GTTTAAATAAGGCT | | | |
| | | CGTTATCAACTTGAAA | | | | AGTCCGTTATCAACT | | | |
| | | AAGTGGCACCGAGTC | | | | TGAAAAAGTGGCAC | | | |
| | | GGTGC | | | | CGAGTCGGTGC | | | |
| 4331 | T_e3_8 | GTTTAAGAGCGAAGC | 6850 | GTTTAAGAGCC | 6993 | GTTTAAGAGCGAAG | Tetraloop | 3 | 82 |
| | | GAAAGCTTCGCAAGT | | | | CGAAAGCTTCGCAA | | | |
| | | TTAAATAAGGCTAGTC | | | | GTTTAAATAAGGCT | | | |
| | | CGTTATCAACTTGAAA | | | | AGTCCGTTATCAACT | | | |
| | | AAGTGGCACCGAGTC | | | | TGAAAAAGTGGCAC | | | |
| | | GGTGC | | | | CGAGTCGGTGC | | | |
| 4332 | T_e3_9 | GTTTAAGAGCGCCTCG | 6851 | GTTTAAGAGCC | 6994 | GTTTAAGAGCGCCTC | Tetraloop | 3 | 82 |
| | | AAAGAGGCGCAAGTT | | | | GAAAGAGGCGCAAG | | | |
| | | TAAATAAGGCTAGTC | | | | TTTAAATAAGGCTA | | | |
| | | CGTTATCAACTTGAAA | | | | GTCCGTTATCAACTT | | | |
| | | AAGTGGCACCGAGTC | | | | GAAAAAGTGGCACC | | | |
| | | GGTGC | | | | GAGTCGGTGC | | | |
| 4333 | T_e3_10 | GTTTAAGAGCCCGGG | 6852 | GTTTAAGAGCC | 6995 | CGGGGAAACTCGGG | Tetraloop | 3 | 82 |
| | | GAAACTCGGGCAAGT | | | | CAAGTTTAAATAAG | | | |
| | | TTAAATAAGGCTAGTC | | | | GCTAGTCCGTTATCA | | | |
| | | CGTTATCAACTTGAAA | | | | ACTTGAAAAAGTGG | | | |
| | | AAGTGGCACCGAGTC | | | | CACCGAGTCGGTGC | | | |
| | | GGTGC | | | | | | | |
| 4334 | T_e3_11 | GTTTAAGAGCGTCTGG | 6853 | GTTTAAGAGCC | 6996 | GTTTAAGAGCGTCTG | Tetraloop | 3 | 82 |
| | | AAACAGACGCAAGTT | | | | GAAACAGACGCAAG | | | |
| | | TAAATAAGGCTAGTC | | | | TTTAAATAAGGCTA | | | |
| | | CGTTATCAACTTGAAA | | | | GTCCGTTATCAACTT | | | |
| | | AAGTGGCACCGAGTC | | | | GAAAAAGTGGCACC | | | |
| | | GGTGC | | | | GAGTCGGTGC | | | |
| 4335 | T_e3_12 | GTTTAAGAGCGCAGG | 6854 | GTTTAAGAGCC | 6997 | GTTTAAGAGCGCAG | Tetraloop | 3 | 82 |
| | | GAAACCTGTGCAAGT | | | | GGAAACCTGTGCAA | | | |
| | | TTAAATAAGGCTAGTC | | | | GTTTAAATAAGGCT | | | |
| | | CGTTATCAACTTGAAA | | | | AGTCCGTTATCAACT | | | |
| | | AAGTGGCACCGAGTC | | | | TGAAAAAGTGGCAC | | | |
| | | GGTGC | | | | CGAGTCGGTGC | | | |
| 4336 | T_e3_13 | GTTTAAGAGCCGCCC | 6855 | GTTTAAGAGCC | 6998 | GCCCGAAAGGGCGG | Tetraloop | 3 | 82 |
| | | GAAAGGGCGGCAAGT | | | | CAAGTTTAAATAAG | | | |
| | | TTAAATAAGGCTAGTC | | | | GCTAGTCCGTTATCA | | | |
| | | CGTTATCAACTTGAAA | | | | ACTTGAAAAAGTGG | | | |
| | | AAGTGGCACCGAGTC | | | | CACCGAGTCGGTGC | | | |
| | | GGTGC | | | | | | | |
| 4337 | T_e3_14 | GTTTAAGAGCCCCGC | 6856 | GTTTAAGAGCC | 6999 | CCGCGAAAGCGGGG | Tetraloop | 3 | 82 |
| | | GAAAGCGGGGCAAGT | | | | CAAGTTTAAATAAG | | | |
| | | TTAAATAAGGCTAGTC | | | | GCTAGTCCGTTATCA | | | |
| | | CGTTATCAACTTGAAA | | | | ACTTGAAAAAGTGG | | | |
| | | AAGTGGCACCGAGTC | | | | CACCGAGTCGGTGC | | | |
| | | GGTGC | | | | | | | |
| 4338 | T_e3_15 | GTTTAAGAGCTGGCA | 6857 | GTTTAAGAGCC | 7000 | GTTTAAGAGCTGGC | Tetraloop | 3 | 82 |
| | | GAAATGCCAGCAAGT | | | | AGAAATGCCAGCAA | | | |
| | | TTAAATAAGGCTAGTC | | | | GTTTAAATAAGGCT | | | |
| | | CGTTATCAACTTGAAA | | | | AGTCCGTTATCAACT | | | |
| | | AAGTGGCACCGAGTC | | | | TGAAAAAGTGGCAC | | | |
| | | GGTGC | | | | CGAGTCGGTGC | | | |
| 4339 | T_e3_16 | GTTTAAGAGCGCCTTG | 6858 | GTTTAAGAGCC | 7001 | GTTTAAGAGCGCCTT | Tetraloop | 3 | 82 |
| | | AAAAAGGCGCAAGTT | | | | GAAAAAGGCGCAAG | | | |
| | | TAAATAAGGCTAGTC | | | | TTTAAATAAGGCTA | | | |
| | | CGTTATCAACTTGAAA | | | | GTCCGTTATCAACTT | | | |
| | | AAGTGGCACCGAGTC | | | | GAAAAAGTGGCACC | | | |
| | | GGTGC | | | | GAGTCGGTGC | | | |
| 4340 | T_e3_17 | GTTTAAGAGCGCCAG | 6859 | GTTTAAGAGCC | 7002 | GTTTAAGAGCGCCA | Tetraloop | 3 | 82 |
| | | GAAACTGGCGCAAGT | | | | GGAAACTGGCGCAA | | | |
| | | TTAAATAAGGCTAGTC | | | | GTTTAAATAAGGCT | | | |
| | | CGTTATCAACTTGAAA | | | | AGTCCGTTATCAACT | | | |
| | | AAGTGGCACCGAGTC | | | | TGAAAAAGTGGCAC | | | |
| | | GGTGC | | | | CGAGTCGGTGC | | | |
| 4341 | T_e3_18 | GTTTAAGAGCCCGCG | 6860 | GTTTAAGAGCC | 7003 | CGCGGAAACGCGGG | Tetraloop | 3 | 82 |
| | | GAAACGCGGGCAAGT | | | | CAAGTTTAAATAAG | | | |
| | | TTAAATAAGGCTAGTC | | | | GCTAGTCCGTTATCA | | | |
| | | CGTTATCAACTTGAAA | | | | ACTTGAAAAAGTGG | | | |
| | | AAGTGGCACCGAGTC | | | | CACCGAGTCGGTGC | | | |
| | | GGTGC | | | | | | | |
| 4342 | T_e3_19 | GTTTAAGAGCCGGCC | 6861 | GTTTAAGAGCC | 7004 | GGCCGAAAGGCCGG | Tetraloop | 3 | 82 |
| | | GAAAGGCCGGCAAGT | | | | CAAGTTTAAATAAG | | | |
| | | TTAAATAAGGCTAGTC | | | | GCTAGTCCGTTATCA | | | |
| | | CGTTATCAACTTGAAA | | | | ACTTGAAAAAGTGG | | | |
| | | AAGTGGCACCGAGTC | | | | CACCGAGTCGGTGC | | | |
| | | GGTGC | | | | | | | |
| 4343 | T_e3_2 | GTTTAAGAGCCCATG | 6862 | GTTTAAGAGCC | 7005 | CATGGAAACATGGG | Tetraloop | 3 | 82 |
| | 0 | GAAACATGGGCAAGT | | | | CAAGTTTAAATAAG | | | |
| | | TTAAATAAGGCTAGTC | | | | GCTAGTCCGTTATCA | | | |
| | | CGTTATCAACTTGAAA | | | | ACTTGAAAAAGTGG | | | |
| | | AAGTGGCACCGAGTC | | | | CACCGAGTCGGTGC | | | |
| | | GGTGC | | | | | | | |
| 4344 | T_e3_21 | GTTTAAGAGCAACCG | 6863 | GTTTAAGAGCC | 7006 | GTTTAAGAGCAACC | Tetraloop | 3 | 82 |
| | | GAAACGGTTGCAAGT | | | | GGAAACGGTTGCAA | | | |
| | | TTAAATAAGGCTAGTC | | | | GTTTAAATAAGGCT | | | |
| | | CGTTATCAACTTGAAA | | | | AGTCCGTTATCAACT | | | |
| | | AAGTGGCACCGAGTC | | | | TGAAAAAGTGGCAC | | | |
| | | GGTGC | | | | CGAGTCGGTGC | | | |
| 4345 | T_e3_22 | GTTTAAGAGCGTTCGG | 6864 | GTTTAAGAGCC | 7007 | GTTTAAGAGCGTTCG | Tetraloop | 3 | 82 |
| | | AAACGAACGCAAGTT | | | | GAAACGAACGCAAG | | | |
| | | TAAATAAGGCTAGTC | | | | TTTAAATAAGGCTA | | | |
| | | CGTTATCAACTTGAAA | | | | GTCCGTTATCAACTT | | | |
| | | AAGTGGCACCGAGTC | | | | GAAAAAGTGGCACC | | | |
| | | GGTGC | | | | GAGTCGGTGC | | | |
| 4346 | T_e3_23 | GTTTAAGAGCGAGGC | 6865 | GTTTAAGAGCC | 7008 | GTTTAAGAGCGAGG | Tetraloop | 3 | 82 |
| | | GAAAGTCTCGCAAGT | | | | CGAAAGTCTCGCAA | | | |
| | | TTAAATAAGGCTAGTC | | | | GTTTAAATAAGGCT | | | |
| | | CGTTATCAACTTGAAA | | | | AGTCCGTTATCAACT | | | |
| | | AAGTGGCACCGAGTC | | | | TGAAAAAGTGGCAC | | | |
| | | GGTGC | | | | CGAGTCGGTGC | | | |
| 4347 | T_e3_24 | GTTTAAGAGCCCGAG | 6866 | GTTTAAGAGCC | 7009 | CGAGGAAACTCGGG | Tetraloop | 3 | 82 |
| | | GAAACTCGGGCAAGT | | | | CAAGTTTAAATAAG | | | |
| | | TTAAATAAGGCTAGTC | | | | GCTAGTCCGTTATCA | | | |
| | | CGTTATCAACTTGAAA | | | | ACTTGAAAAAGTGG | | | |
| | | AAGTGGCACCGAGTC | | | | CACCGAGTCGGTGC | | | |
| | | GGTGC | | | | | | | |
| 4348 | T_e3_25 | GTTTAAGAGCCGCAG | 6867 | GTTTAAGAGCC | 7010 | GCAGGAAACTGCGG | Tetraloop | 3 | 82 |
| | | GAAACTGCGGCAAGT | | | | CAAGTTTAAATAAG | | | |
| | | TTAAATAAGGCTAGTC | | | | GCTAGTCCGTTATCA | | | |
| | | CGTTATCAACTTGAAA | | | | ACTTGAAAAAGTGG | | | |
| | | AAGTGGCACCGAGTC | | | | CACCGAGTCGGTGC | | | |
| | | GGTGC | | | | | | | |
| 4349 | T_e3_26 | GTTTAAGAGCTCCACG | 6868 | GTTTAAGAGCC | 7011 | GTTTAAGAGCTCCAC | Tetraloop | 3 | 82 |
| | | AAAGTGGAGCAAGTT | | | | GAAAGTGGAGCAAG | | | |
| | | TAAATAAGGCTAGTC | | | | TTTAAATAAGGCTA | | | |
| | | CGTTATCAACTTGAAA | | | | GTCCGTTATCAACTT | | | |
| | | AAGTGGCACCGAGTC | | | | GAAAAAGTGGCACC | | | |
| | | GGTGC | | | | GAGTCGGTGC | | | |
| 4350 | canonical | GTTTTAGAGCTAGAA | 6869 | | 7012 | GTTTTAGAGCTAGA | none | 0 | 76 |
| or 16 | SpCas9 | ATAGCAAGTTAAAAT | | | | AATAGCAAGTTAAA | | | |
| | | AAGGCTAGTCCGTTAT | | | | ATAAGGCTAGTCCG | | | |
| | | CAACTTGAAAAAGTG | | | | TTATCAACTTGAAAA | | | |
| | | GCACCGAGTCGGTGC | | | | AGTGGCACCGAGTC | | | |
| | | | | | | GGTGC | | | |
| 4351 | dnr6 | GTTTTAGAGCGCGGA | 6870 | | 7013 | GTTTTAGAGCGCGG | Tetraloop | 1 | 78 |
| | | AACGCGCAAGTTAAA | | | | AAACGCGCAAGTTA | | | |
| | | ATAAGGCTAGTCCGTT | | | | AAATAAGGCTAGTC | | | |
| | | ATCAACTTGAAAAAG | | | | CGTTATCAACTTGAA | | | |
| | | TGGCACCGAGTCGGT | | | | AAAGTGGCACCGAG | | | |
| | | GC | | | | TCGGTGC | | | |
| 4352 | dnr6_flip | GTTTAAGAGCGCGGA | 6871 | | 7014 | GTTTAAGAGCGCGG | Tetraloop | 1 | 78 |
| | | AACGCGCAAGTTTAA | | | | AAACGCGCAAGTTT | | | |
| | | ATAAGGCTAGTCCGTT | | | | AAATAAGGCTAGTC | | | |
| | | ATCAACTTGAAAAAG | | | | CGTTATCAACTTGAA | | | |
| | | TGGCACCGAGTCGGT | | | | AAAGTGGCACCGAG | | | |
| | | GC | | | | TCGGTGC | | | |
| 4353 | M4 | GTTTAAGAGCTAGAA | 6872 | | 7015 | GTTTAAGAGCTAGA | none | 0 | 76 |
| | | ATAGCAAGTTTAAAT | | | | AATAGCAAGTTTAA | | | |
| | | AAGGCTAGTCCGTTAT | | | | ATAAGGCTAGTCCG | | | |
| | | CAACTTGAAAAAGTG | | | | TTATCAACTTGAAAA | | | |
| | | GCACCGAGTCGGTGC | | | | AGTGGCACCGAGTC | | | |
| | | | | | | GGTGC | | | |
| 4354 | F + E | GTTTAAGAGCTATGCT | 6873 | | 7016 | GTTTAAGAGCTATGC | Tetraloop | 5 | 86 |
| | | GGAAACAGCATAGCA | | | | TGGAAACAGCATAG | | | |
| | | AGTTTAAATAAGGCT | | | | CAAGTTTAAATAAG | | | |
| | | AGTCCGTTATCAACTT | | | | GCTAGTCCGTTATCA | | | |
| | | GAAAAAGTGGCACCG | | | | ACTTGAAAAAGTGG | | | |
| | | AGTCGGTGC | | | | CACCGAGTCGGTGC | | | |
| 4355 | s12_flip | GTTTAAGAGCTAGAA | 6874 | | 7017 | GTTTAAGAGCTAGA | none | 0 | 76 |
| | | ATAGCAAGTTTAAAT | | | | AATAGCAAGTTTAA | | | |
| | | AAGGCTAGTCCGTTAT | | | | ATAAGGCTAGTCCG | | | |
| | | CAGCGTGAAAACGCG | | | | TTATCAGCGTGAAA | | | |
| | | GCACCGAGTCGGTGC | | | | ACGCGGCACCGAGT | | | |
| | | | | | | CGGTGC | | | |
| 4356 | FE_s12 | GTTTAAGAGCTATGCT | 6875 | | 7018 | GTTTAAGAGCTATGC | Tetraloop | 5 | 86 |
| | | GGAAACAGCATAGCA | | | | TGGAAACAGCATAG | | | |
| | | AGTTTAAATAAGGCT | | | | CAAGTTTAAATAAG | | | |
| | | AGTCCGTTATCAGCGT | | | | GCTAGTCCGTTATCA | | | |
| | | GAAAACGCGGCACCG | | | | GCGTGAAAACGCGG | | | |
| | | AGTCGGTGC | | | | CACCGAGTCGGTGC | | | |
| 4357 | flip_U46A | GTTTAAGAGCTAGAA | 6876 | | 7019 | GTTTAAGAGCTAGA | none | 0 | 76 |
| | | ATAGCAAGTTTAAAT | | | | AATAGCAAGTTTAA | | | |
| | | AAGGCTAGTCCGTTA | | | | ATAAGGCTAGTCCG | | | |
| | | ACAACTTGAAAAAGT | | | | TTAACAACTTGAAA | | | |
| | | GGCACCGAGTCGGTG | | | | AAGTGGCACCGAGT | | | |
| | | C | | | | CGGTGC | | | |
| 4358 | M4_GC | GTTTGAGAGCTAGAA | 6877 | | 7020 | GTTTGAGAGCTAGA | none | 0 | 76 |
| | | ATAGCAAGTTCAAAT | | | | AATAGCAAGTTCAA | | | |
| | | AAGGCTAGTCCGTTAT | | | | ATAAGGCTAGTCCG | | | |
| | | CAACTTGAAAAAGTG | | | | TTATCAACTTGAAAA | | | |
| | | GCACCGAGTCGGTGC | | | | AGTGGCACCGAGTC | | | |
| | | | | | | GGTGC | | | |
| 4359 | M4_CG | GTTTCAGAGCTAGAA | 6878 | | 7021 | GTTTCAGAGCTAGA | none | 0 | 76 |
| | | ATAGCAAGTTGAAAT | | | | AATAGCAAGTTGAA | | | |
| | | AAGGCTAGTCCGTTAT | | | | ATAAGGCTAGTCCG | | | |
| | | CAACTTGAAAAAGTG | | | | TTATCAACTTGAAAA | | | |
| | | GCACCGAGTCGGTGC | | | | AGTGGCACCGAGTC | | | |
| | | | | | | GGTGC | | | |

### Nucleotide Editing

[0225] Provided herein are exemplary PEgRNAs with modifications disclosed herein for nucleotide editing. An intended nucleotide edit in an editing template of a PEgRNA may comprise various types of alterations as compared to the target gene sequence. In some embodiments, the nucleotide edit is a single nucleotide substitution as compared to the target gene sequence. In some embodiments, the nucleotide edit is a deletion as compared to the target gene sequence. In some embodiments, the nucleotide edit is an insertion as compared to the target gene sequence. In some embodiments, the editing template comprises one to ten intended nucleotide edits as compared to the target gene sequence. In some embodiments, the editing template comprises one or more intended nucleotide edits as compared to the target gene sequence. In some embodiments, the editing template comprises two or more intended nucleotide edits as compared to the target gene sequence. In some embodiments, the editing template comprises three or more intended nucleotide edits as compared to the target gene sequence. In some embodiments, the editing template comprises four or more, five or more, or six or more intended nucleotide edits as compared to the target gene sequence. In some embodiments, the editing template comprises two single nucleotide substitutions, insertions, deletions, or any combination thereof, as compared to the target gene sequence. In some embodiments, the editing template comprises three single nucleotide substitutions, insertions, deletions, or any combination thereof, as compared to the target gene sequence. In some embodiments, the editing template comprises four, five, or six single nucleotide substitutions, insertions, deletions, or any combination thereof, as compared to the target gene sequence. In some embodiments, a nucleotide substitution comprises an adenine (A)-to-thymine (T) substitution. In some embodiments, a nucleotide substitution comprises an A-to-guanine (G) substitution. In some embodiments, a nucleotide substitution comprises an A-to-cytosine (C) substitution. In some embodiments, a nucleotide substitution comprises a T-A substitution. In some embodiments, a nucleotide substitution comprises a T-G substitution. In some embodiments, a nucleotide substitution comprises a T-C substitution. In some embodiments, a nucleotide substitution comprises a G-to-A substitution. In some embodiments, a nucleotide substitution comprises a G-to-T substitution. In some embodiments, a nucleotide substitution comprises a G-to-C substitution. In some embodiments, a nucleotide substitution comprises a C-to-A substitution. In some embodiments, a nucleotide substitution comprises a C-to-T substitution. In some embodiments, a nucleotide substitution comprises a C-to-G substitution.

[0226] In some embodiments, a nucleotide insertion is at least 5 nucleotides, at least 6 nucleotides, at least 7 nucleotides, at least 8 nucleotides, at least 9 nucleotides, at least 10 nucleotides, at least 11 nucleotides, at least 12 nucleotides, at least 13 nucleotides, at least 14 nucleotides, at least 15 nucleotides, at least 16 nucleotides, at least 17 nucleotides, at least 18 nucleotides, at least 19 nucleotides, or at least 20 nucleotides in length. In some embodiments, a nucleotide insertion is from 1 to 2 nucleotides, from 1 to 3 nucleotides, from 1 to 4 nucleotides, from 1 to 5 nucleotides, form 2 to 5 nucleotides, from 3 to 5 nucleotides, from 3 to 6 nucleotides, from 3 to 8 nucleotides, from 4 to 9 nucleotides, from 5 to 10 nucleotides, from 6 to 11 nucleotides, from 7 to 12 nucleotides, from 8 to 13 nucleotides, from 9 to 14 nucleotides, from 10 to 15 nucleotides, from 11 to 16 nucleotides, from 12 to 17 nucleotides, from 13 to 18 nucleotides, from 14 to 19 nucleotides, from 15 to 20 nucleotides in length. In some embodiments, a nucleotide insertion is a single nucleotide insertion. In some embodiments, a nucleotide insertion comprises insertion of two nucleotides.

[0227] The editing template of a PEgRNA may comprise one or more intended nucleotide edits, compared to the gene to be edited. Position of the intended nucleotide edit(s) relevant to other components of the PEgRNA, or to particular nucleotides (e.g., mutations) in the target gene may vary. In some embodiments, the nucleotide edit is in a region of the PEgRNA corresponding to or homologous to the protospacer sequence. In some embodiments, the nucleotide edit is in a region of the PEgRNA corresponding to a region of the gene outside of the protospacer sequence.

[0228] In some embodiments, the position of a nucleotide edit incorporation in the target gene may be determined based on position of the protospacer adjacent motif (PAM). For instance, the intended nucleotide edit may be installed in a sequence corresponding to the protospacer adjacent motif (PAM) sequence. In some embodiments, a nucleotide edit in the editing template is at a position corresponding to the 5′ most nucleotide of the PAM sequence. In some embodiments, a nucleotide edit in the editing template is at a position corresponding to the 3′ most nucleotide of the PAM sequence. In some embodiments, position of an intended nucleotide edit in the editing template may be referred to by aligning the editing template with the partially complementary edit strand of the target gene, and referring to nucleotide positions on the editing strand where the intended nucleotide edit is incorporated. In some embodiments, a nucleotide edit is incorporated at a position corresponding to about 0, 1, 2, 3, 4, 5, 6, 7, 8, 9, 10, 11, 12, 13, 14, 15, 16, 17, 18, 19, 20, 21, 22, 23, 24, 25, 26, 27, 28, 29, 30, 31, 32, 33, 34, 35, 36, 37, 38, 39, or 40 basepairs upstream of the 5′ most nucleotide of the PAM sequence in the edit strand of the target gene. By 0 basepair upstream or downstream of a reference position, it is meant that the intended nucleotide is immediately upstream or downstream of the reference position. In some embodiments, a nucleotide edit is incorporated at a position corresponding to about 0 to 2 basepairs, 0 to 4 basepairs, 0 to 6 basepairs, 0 to 8 basepairs, 0 to 10 basepairs, 2 to 4 basepairs, 2 to 6 basepairs, 2 to 8 basepairs, 2 to 10 basepairs, 2 to 12 basepairs, 4 to 6 basepairs, 4 to 8 basepairs, 4 to 10 basepairs, 4 to 12 basepairs, 4 to 14 basepairs, 6 to 8 basepairs, 6 to 10 basepairs, 6 to 12 basepairs, 6 to 14 basepairs, 6 to 16 basepairs, 8 to 10 basepairs, 8 to 12 basepairs, 8 to 14 basepairs, 8 to 16 basepairs, 8 to 18 basepairs, 10 to 12 basepairs, 10 to 14 basepairs, 10 to 16 basepairs, 10 to 18 basepairs, 10 to 20 basepairs, 12 to 14 basepairs, 12 to 16 basepairs, 12 to 18 basepairs, 12 to 20 basepairs, 12 to 22 basepairs, 14 to 16 basepairs, 14 to 18 basepairs, 14 to 20 basepairs, 14 to 22 basepairs, 14 to 24 basepairs, 16 to 18 basepairs, 16 to 20 basepairs, 16 to 22 basepairs, 16 to 24 basepairs, 16 to 26 basepairs, 18 to 20 basepairs, 18 to 22 basepairs, 18 to 24 basepairs, 18 to 26 basepairs, 18 to 28 basepairs, 20 to 22 basepairs, 20 to 24 basepairs, 20 to 26 basepairs, 20 to 28 basepairs, or 20 to 30 basepairs upstream of the 5′ most nucleotide of the PAM sequence. In some embodiments, the nucleotide edit is incorporated at a position corresponding to 3 basepairs upstream of the 5′ most nucleotide of the PAM sequence. In some embodiments, the nucleotide edit in is incorporated at a position corresponding to 4 basepairs upstream of the 5′ most nucleotide of the PAM sequence. In some embodiments, the nucleotide edit is incorporated at a position corresponding to 5 basepairs upstream of the 5′ most nucleotide of the PAM sequence. In some embodiments, the nucleotide edit in the editing template is at a position corresponding to 6 basepairs upstream of the 5′ most nucleotide of the PAM sequence.

[0229] In some embodiments, an intended nucleotide edit is incorporated at a position corresponding to about 0, 1, 2, 3, 4, 5, 6, 7, 8, 9, 10, 11, 12, 13, 14, 15, 16, 17, 18, 19, 20, 21, 22, 23, 24, 25, 26, 27, 28, 29, 30, 31, 32, 33, 34, 35, 36, 37, 38, 39, or 40 basepairs downstream of the 5′ most nucleotide of the PAM sequence in the edit strand of the target gene. In some embodiments, a nucleotide edit is incorporated at a position corresponding to about 0 to 2 basepairs, 0 to 4 basepairs, 0 to 6 basepairs, 0 to 8 basepairs, 0 to 10 basepairs, 2 to 4 basepairs, 2 to 6 basepairs, 2 to 8 basepairs, 2 to 10 basepairs, 2 to 12 basepairs, 4 to 6 basepairs, 4 to 8 basepairs, 4 to 10 basepairs, 4 to 12 basepairs, 4 to 14 basepairs, 6 to 8 basepairs, 6 to 10 basepairs, 6 to 12 basepairs, 6 to 14 basepairs, 6 to 16 basepairs, 8 to 10 basepairs, 8 to 12 basepairs, 8 to 14 basepairs, 8 to 16 basepairs, 8 to 18 basepairs, 10 to 12 basepairs, 10 to 14 basepairs, 10 to 16 basepairs, 10 to 18 basepairs, 10 to 20 basepairs, 12 to 14 basepairs, 12 to 16 basepairs, 12 to 18 basepairs, 12 to 20 basepairs, 12 to 22 basepairs, 14 to 16 basepairs, 14 to 18 basepairs, 14 to 20 basepairs, 14 to 22 basepairs, 14 to 24 basepairs, 16 to 18 basepairs, 16 to 20 basepairs, 16 to 22 basepairs, 16 to 24 basepairs, 16 to 26 basepairs, 18 to 20 basepairs, 18 to 22 basepairs, 18 to 24 basepairs, 18 to 26 basepairs, 18 to 28 basepairs, 20 to 22 basepairs, 20 to 24 basepairs, 20 to 26 basepairs, 20 to 28 basepairs, or 20 to 30 basepairs downstream of the 5′ most nucleotide of the PAM sequence. In some embodiments, a nucleotide edit is incorporated at a position corresponding to 3 basepairs downstream of the 5′ most nucleotide of the PAM sequence. In some embodiments, a nucleotide edit is incorporated at a position corresponding to 4 basepairs downstream of the 5′ most nucleotide of the PAM sequence. In some embodiments, a nucleotide edit is incorporated at a position corresponding to 5 basepairs downstream of the 5′ most nucleotide of the PAM sequence. In some embodiments, a nucleotide edit is incorporated at a position corresponding to 6 basepairs downstream of the 5′ most nucleotide of the PAM sequence. By “upstream” and “downstream” it is intended to define relevant positions at least two regions or sequences in a nucleic acid molecule orientated in a 5′-to-3′ direction. For example, a first sequence is upstream of a second sequence in a DNA molecule where the first sequence is positioned 5′ to the second sequence. Accordingly, the second sequence is downstream of the first sequence.

[0230] When referred to in the PEgRNA, positions of the one or more intended nucleotide edits may be referred to relevant to components of the PEgRNA. For example, an intended nucleotide edit may be 5′ or 3′ to the PBS. In some embodiments, a PEgRNA comprises the structure, from 5′ to 3′: a spacer, a gRNA core, an editing template, and a PBS. In some embodiments, the intended nucleotide edit is 0, 1, 2, 3, 4, 5, 6, 7, 8, 9, 10, 11, 12, 13, 14, 15, 16, 17, 18, 19, 20, 21, 22, 23, 24, 25, 26, 27, 28, 29, 30, 31, 32, 33, 34, 35, 36, 37, 38, 39, or 40 basepairs upstream to the 5′ most nucleotide of the PBS. In some embodiments, the intended nucleotide edit is 0 to 2 basepairs, 0 to 4 basepairs, 0 to 6 basepairs, 0 to 8 basepairs, 0 to 10 basepairs, 2 to 4 basepairs, 2 to 6 basepairs, 2 to 8 basepairs, 2 to 10 basepairs, 2 to 12 basepairs, 4 to 6 basepairs, 4 to 8 basepairs, 4 to 10 basepairs, 4 to 12 basepairs, 4 to 14 basepairs, 6 to 8 basepairs, 6 to 10 basepairs, 6 to 12 basepairs, 6 to 14 basepairs, 6 to 16 basepairs, 8 to 10 basepairs, 8 to 12 basepairs, 8 to 14 basepairs, 8 to 16 basepairs, 8 to 18 basepairs, 10 to 12 basepairs, 10 to 14 basepairs, 10 to 16 basepairs, 10 to 18 basepairs, 10 to 20 basepairs, 12 to 14 basepairs, 12 to 16 basepairs, 12 to 18 basepairs, 12 to 20 basepairs, 12 to 22 basepairs, 14 to 16 basepairs, 14 to 18 basepairs, 14 to 20 basepairs, 14 to 22 basepairs, 14 to 24 basepairs, 16 to 18 basepairs, 16 to 20 basepairs, 16 to 22 basepairs, 16 to 24 basepairs, 16 to 26 basepairs, 18 to 20 basepairs, 18 to 22 basepairs, 18 to 24 basepairs, 18 to 26 basepairs, 18 to 28 basepairs, 20 to 22 basepairs, 20 to 24 basepairs, 20 to 26 basepairs, 20 to 28 basepairs, or 20 to 30 basepairs upstream to the 5′ most nucleotide of the PBS.

[0231] The corresponding positions of the intended nucleotide edit incorporated in the target gene may also be referred to bases on the nicking position generated by a prime editor based on sequence homology and complementarity. For example, in embodiments, the distance between the nucleotide edit to be incorporated into the target gene and the nick generated by the prime editor may be determined when the spacer hybridizes with the search target sequence and the extension arm hybridizes with the editing target sequence. In certain embodiments, the position of the nucleotide edit can be in any position downstream of the nick site on the edit strand (or the PAM strand) generated by the prime editor, such that the distance between the nick site and the intended nucleotide edit is 0, 1, 2, 3, 4, 5, 6, 7, 8, 9, 10, 11, 12, 13, 14, 15, 16, 17, 18, 19, 20, 21, 22, 23, 24, 25, 26, 27, 28, 29, or 30 nucleotides in length. In some embodiments, the position of the nucleotide edit is 0, 1, 2, 3, 4, 5, 6, 7, 8, 9, 10, 11, 12, 13, 14, 15, 16, 17, 18, 19, 20, 21, 22, 23, 24, 25, 26, 27, 28, 29, or 30 nucleotides upstream of the nick site on the edit strand. In some embodiments, the position of the nucleotide edit is 0, 1, 2, 3, 4, 5, 6, 7, 8, 9, 10, 11, 12, 13, 14, 15, 16, 17, 18, 19, 20, 21, 22, 23, 24, 25, 26, 27, 28, 29, or 30 nucleotides downstream of the nick site on the edit strand. In some embodiments, the position of the nucleotide edit is 0 basepairs from the nick site on the edit strand, that is, the editing position is at the same position as the nick site. As used herein, the distance between the nick site and the nucleotide edit, for example, where the nucleotide edit comprises an insertion or deletion, refers to the 5′ most position of the nucleotide edit for a nick that creates a 3′ free end on the edit strand (i.e., the “near position” of the nucleotide edit to the nick site). Similarly, as used herein, the distance between the nick site and a PAM position edit, for example, where the nucleotide edit comprises an insertion, deletion, or substitution of two or more contiguous nucleotides, refers to the 5′ most position of the nucleotide edit and the 5′ most position of the PAM sequence.

[0232] A PEgRNA may also comprise optional modifiers, e.g., 3′ end modifier region and/or a 5′ end modifier region. In some embodiments, a PEgRNA comprises at least one nucleotide that is not part of a spacer, a gRNA core, or an extension arm. The optional sequence modifiers could be positioned within or between any of the other regions shown, and not limited to being located at the 3′ and 5′ ends. In certain embodiments, the PEgRNA comprises secondary RNA structure, such as, but not limited to, aptamers, hairpins, stem/loops, toeloops, and/or RNA-binding protein recruitment domains (e.g., the MS2 aptamer which recruits and binds to the MS2cp protein). In some embodiments, a PEgRNA comprises a short stretch of uracil at the 5′ end or the 3′ end. For example, in some embodiments, a PEgRNA comprising a 3′ extension arm comprises a “UUU” sequence at the 3′ end of the extension arm. In some embodiments, a PEgRNA comprises a toeloop sequence at the 3′ end. In some embodiments, the PEgRNA comprises a 3′ extension arm and a toeloop sequence at the 3′ end of the extension arm. In some embodiments, the PEgRNA comprises a 5′ extension arm and a toeloop sequence at the 5′ end of the extension arm. In some embodiments, the PEgRNA comprises a toeloop element having the sequence 5′-GAAANNNNN-3′, wherein N is any nucleobase. In some embodiments, the secondary RNA structure is positioned within the spacer. In some embodiments, the secondary structure is positioned within the extension arm. In some embodiments, the secondary structure is positioned within the gRNA core. In some embodiments, the secondary structure is positioned between the spacer and the gRNA core, between the gRNA core and the extension arm, or between the spacer and the extension arm. In some embodiments, the secondary structure is positioned between the PBS and the editing template. In some embodiments the secondary structure is positioned at the 3′ end or at the 5′ end of the PEgRNA. In some embodiments, the PEgRNA comprises a transcriptional termination signal at the 3′ end of the PEgRNA. In addition to secondary RNA structures, the PEgRNA may comprise a chemical linker or a poly(N) linker or tail, where “N” can be any nucleobase. In some embodiments, the chemical linker may function to prevent reverse transcription of the gRNA core.

[0233] In some embodiments, a prime editing system or composition further comprises a nick guide polynucleotide, such as a nick guide RNA (ngRNA). Without wishing to be bound by any particular theory, the non-edit strand of a double stranded target DNA in the target gene may be nicked by a CRISPR-Cas nickase directed by an ngRNA. In some embodiments, the nick on the non-edit strand directs endogenous DNA repair machinery to use the edit strand as a template for repair of the non-edit strand, which may increase efficiency of prime editing. In some embodiments, the non-edit strand is nicked by a prime editor localized to the non-edit strand by the ngRNA. Accordingly, also provided herein are PEgRNA systems comprising at least one PEgRNA and at least one ngRNA.

[0234] In some embodiments, the ngRNA is a guide RNA which contains a variable spacer sequence and a guide RNA scaffold or core region that interacts with the DNA binding domain, e.g., Cas9 of the prime editor. In some embodiments, the ngRNA comprises a spacer sequence (referred to herein as an ng spacer, or a second spacer) that is substantially complementary to a second search target sequence (or ng search target sequence), which is located on the edit strand, or the non-target strand. Thus, in some embodiments, the ng search target sequence recognized by the ng spacer and the search target sequence recognized by the spacer sequence of the PEgRNA are on opposite strands of the double stranded target DNA of target gene, e.g., the gene.

[0235] A prime editing system or composition that does not comprise a ngRNA may be referred to as a “PE2” prime editing system. A prime editing system or composition comprising a ngRNA may be referred to as a “PE3” prime editing system or PE3 prime editing complex.

[0236] In some embodiments, the ng search target sequence is located on the non-target strand, within 10 basepairs to 100 basepairs of an intended nucleotide edit incorporated by the PEgRNA on the edit strand. In some embodiments, the ng target search target sequence is within 10 bp, 20 bp, 30 bp, 40 bp, 50 bp, 60 bp, 70 bp, 80 bp, 90 bp, 91 bp, 92 bp, 93 bp, 94 bp, 95 bp, 96 bp, 97 bp, 98 bp, 99 bp, or 100 bp of an intended nucleotide edit incorporated by the PEgRNA on the edit strand. In some embodiments, the 5′ ends of the ng search target sequence and the PEgRNA search target sequence are within 1, 2, 3, 4, 5, 6, 7, 8, 9, or 10 bp apart from each other. In some embodiments, the 5′ ends of the ng search target sequence and the PEgRNA search target sequence are within 10 bp, 20 bp, 30 bp, 40 bp, 50 bp, 60 bp, 70 bp, 80 bp, 90 bp, 91 bp, 92 bp, 93 bp, 94 bp, 95 bp, 96 bp, 97 bp, 98 bp, 99 bp, or 100 bp apart from each other.

[0237] In some embodiments, an ng spacer sequence is complementary to, and may hybridize with the second search target sequence only after an intended nucleotide edit has been incorporated on the edit strand, by the editing template of a PEgRNA. Such a prime editing system may be referred to as a “PE3b” prime editing system or composition. In some embodiments, the ngRNA comprises a spacer sequence that matches only the edit strand after incorporation of the nucleotide edits, but not the endogenous target gene sequence on the edit strand. Accordingly, in some embodiments, an intended nucleotide edit is incorporated within the ng search target sequence. In some embodiments, the intended nucleotide edit is incorporated within about 1-10 nucleotides of the position corresponding to the PAM of the ng search target sequence.

[0238] A PEgRNA and/or an ngRNA of this disclosure, in some embodiments, may include modified nucleotides, e.g., chemically modified DNA or RNA nucleobases, and may include one or more nucleobase analogs (e.g., modifications which might add functionality, such as temperature resilience). In some embodiments, PEgRNAs and/or ngRNAs as described herein may be chemically modified. The phrase “chemical modifications,” as used herein, can include modifications which introduce chemistries which differ from those seen in naturally occurring DNA or RNAs, for example, covalent modifications such as the introduction of modified nucleotides, (e.g., nucleotide analogs, or the inclusion of pendant groups which are not naturally found in DNA or RNA molecules).

[0239] In some embodiments, the PEgRNAs and/or ngRNAs provided in this disclosure may have undergone a chemical or biological modifications. Modifications may be made at any position within a PEgRNA or ngRNA, and may include modification to a nucleobase or to a phosphate backbone of the PEgRNA or ngRNA. In some embodiments, chemical modifications can be a structure guided modifications. In some embodiments, a chemical modification is at the 5′ end and/or the 3′ end of a PEgRNA. In some embodiments, a chemical modification is at the 5′ end and/or the 3′ end of a ngRNA. In some embodiments, a chemical modification may be within the spacer sequence, the extension arm, the editing template sequence, or the primer binding site of a PEgRNA. In some embodiments, a chemical modification may be within the spacer sequence or the gRNA core of a PEgRNA or a ngRNA. In some embodiments, a chemical modification may be within the 3′ most nucleotides of a PEgRNA or ngRNA. In some embodiments, a chemical modification may be within the 3′ most end of a PEgRNA or ngRNA. In some embodiments, a chemical modification may be within the 5′ most end of a PEgRNA or ngRNA. In some embodiments, a PEgRNA or ngRNA comprises 1, 2, 3, 4, 5, 6, 7, 8, 9, 10 or more chemically modified nucleotides at the 3′ end. In some embodiments, a PEgRNA or ngRNA comprises 1, 2, 3, 4, 5, 6, 7, 8, 9, 10 or more chemically modified nucleotides at the 5′ end. In some embodiments, a PEgRNA or ngRNA comprises 1, 2, 3, 4, or 5 or more chemically modified nucleotides at the 3′ end. In some embodiments, a PEgRNA or ngRNA comprises 1, 2, 3, 4, or 5 more chemically modified nucleotides at the 5′ end. In some embodiments, a PEgRNA or ngRNA comprises 1, 2, or 3 or more chemically modified nucleotides at the 3′ end. In some embodiments, a PEgRNA or ngRNA comprises 1, 2, or 3 more chemically modified nucleotides at the 5′ end. In some embodiments, a PEgRNA or ngRNA comprises 1, 2, 3, 4, 5, 6, 7, 8, 9, 10 or more contiguous chemically modified nucleotides at the 3′ end. In some embodiments, a PEgRNA or ngRNA comprises 1, 2, 3, 4, 5, 6, 7, 8, 9, 10 or more contiguous chemically modified nucleotides at the 5′ end. In some embodiments, a PEgRNA or ngRNA comprises 1, 2, 3, 4, or 5 contiguous chemically modified nucleotides at the 3′ end. In some embodiments, a PEgRNA or ngRNA comprises 1, 2, 3, 4, or 5 contiguous chemically modified nucleotides at the 5′ end. In some embodiments, a PEgRNA or ngRNA comprises 1, 2, or 3 contiguous chemically modified nucleotides at the 3′ end. In some embodiments, a PEgRNA or ngRNA comprises 1, 2, or 3 contiguous chemically modified nucleotides at the 5′ end. In some embodiments, a PEgRNA or ngRNA comprises 3 contiguous chemically modified nucleotides at the 3′ end. In some embodiments, a PEgRNA or ngRNA comprises 1, 2, 3, 4, 5, or more chemically modified nucleotides near the 3′ end. In some embodiments, a PEgRNA or ngRNA comprises 3 contiguous chemically modified nucleotides at the 3′ end. In some embodiments, a PEgRNA or ngRNA comprises 3 contiguous chemically modified nucleotides at the 5′ end. In some embodiments, a PEgRNA or ngRNA comprises 1, 2, 3, 4, 5, or more chemically modified nucleotides near the 3′ end. In some embodiments, a PEgRNA or ngRNA comprises 1, 2, 3, 4, 5, or more contiguous chemically modified nucleotides near the 3′ end. In some embodiments, a PEgRNA or ngRNA comprises 1, 2, 3, 4, 5, or more chemically modified nucleotides near the 3′ end, where the 3′ most nucleotide is not modified, and the 1, 2, 3, 4, 5, or more chemically modified nucleotides precede the 3′ most nucleotide in a 5′-to-3′ order. In some embodiments, a PEgRNA or ngRNA comprises 1, 2, 3, 4, 5, 6, 7, 8, 9, 10, 11, 12, 13, 14, 15, 16, 17, 18, 19, 20, 21, 22, 23, 24, 25, 26, 27, 28, 29, 30, 31, 32, 33, 34, 35 or more chemically modified nucleotides near the 3′ end, where the 3′ most nucleotide is not modified, and the 1, 2, 3, 4, 5, 6, 7, 8, 9, 10, 11, 12, 13, 14, 15, 16, 17, 18, 19, 20, 21, 22, 23, 24, 25, 26, 27, 28, 29, 30, 31, 32, 33, 34, 35 or more chemically modified nucleotides precede the 3′ most nucleotide in a 5′-to-3′ order.

[0240] In some embodiments, a PEgRNA or ngRNA comprises one or more chemical modified nucleotides in the gRNA core. As exemplified in FIG. 8, the gRNA core of a PEgRNA may comprise one or more regions of a basepaired lower stem, a basepaired upper stem, where the lower stem and upper stem may be connected by a bulge comprising unpaired RNAs. The gRNA core may further comprise a nexus distal from the spacer sequence. In some embodiments, the gRNA core comprises one or more chemically modified nucleotides in the lower stem, upper stem, and/or the hairpin regions. In some embodiments, all of the nucleotides in the lower stem, upper stem, and/or the hairpin regions are chemically modified.

[0241] A chemical modification to a PEgRNA or ngRNA can comprise a 2′-O-thionocarbamate-protected nucleoside phosphoramidite, a 2′-O-methyl (M), a 2′-O-methyl 3′phosphorothioate (MS), or a 2′-O-methyl 3′thioPACE (MSP), or any combination thereof. In some embodiments, a chemically modified PEgRNA and/or ngRNA can comprise a 2′-O-methyl (M) RNA, a 2′-O-methyl 3′phosphorothioate (MS) RNA, a 2′-O-methyl 3′thioPACE (MSP) RNA, a 2′-F RNA, a phosphorothioate bond modification, any other chemical modifications known in the art, or any combination thereof. A chemical modification may also include, for example, the incorporation of non-nucleotide linkages or modified nucleotides into the PEgRNA and/or ngRNA (e.g., modifications to one or both of the 3′ and 5′ ends of a guide RNA molecule). Such modifications can include the addition of bases to an RNA sequence, complexing the RNA with an agent (e.g., a protein or a complementary nucleic acid molecule), and inclusion of elements which change the structure of an RNA molecule (e.g., which form secondary structures).

### Prime Editor

[0242] The term “prime editor (PE)” refers to the polypeptide or polypeptide components involved in prime editing, or any polynucleotide(s) encoding the polypeptide or polypeptide components. In various embodiments, a prime editor includes a polypeptide domain having DNA binding activity and a polypeptide domain having DNA polymerase activity. In some embodiments, the prime editor further comprises a polypeptide domain having nuclease activity. In some embodiments, the polypeptide domain having DNA binding activity comprises a nuclease domain or nuclease activity. In some embodiments, the polypeptide domain having nuclease activity comprises a nickase, or a fully active nuclease. As used herein, the term “nickase” refers to a nuclease capable of cleaving only one strand of a double-stranded DNA target. In some embodiments, the prime editor comprises a polypeptide domain that is an inactive nuclease. In some embodiments, the polypeptide domain having programmable DNA binding activity comprises a nucleic acid guided DNA binding domain, for example, a CRISPR-Cas protein, for example, a Cas9 nickase, a Cpf1 nickase, or another CRISPR-Cas nuclease. In some embodiments, the polypeptide domain having DNA polymerase activity comprises a template-dependent DNA polymerase, for example, a DNA-dependent DNA polymerase or an RNA-dependent DNA polymerase. In some embodiments, the DNA polymerase is a reverse transcriptase. In some embodiments, the prime editor comprises additional polypeptides involved in prime editing, for example, a polypeptide domain having 5′ endonuclease activity, e.g., a 5′ endogenous DNA flap endonucleases (e.g., FEN1), for helping to drive the prime editing process towards the edited product formation. In some embodiments, the prime editor further comprises an RNA-protein recruitment polypeptide, for example, a MS2 coat protein.

[0243] A prime editor may be engineered. In some embodiments, the polypeptide components of a prime editor do not naturally occur in the same organism or cellular environment. In some embodiments, the polypeptide components of a prime editor may be of different origins or from different organisms. In some embodiments, a prime editor comprises a DNA binding domain and a DNA polymerase domain that are derived from different species. In some embodiments, a prime editor comprises a Cas polypeptide and a reverse transcriptase polypeptide that are derived from different species. For example, a prime editor may comprise a S. pyogenes Cas9 polypeptide and a Moloney murine leukemia virus (M-MLV) reverse transcriptase polypeptide.

[0244] In some embodiments, polypeptide domains of a prime editor may be fused or linked by a peptide linker to form a fusion protein. In other embodiments, a prime editor comprises one or more polypeptide domains provided in trans as separate proteins, which are capable of being associated to each other through non-peptide linkages or through aptamers or recruitment sequences. For example, a prime editor may comprise a DNA binding domain and a reverse transcriptase domain associated with each other by an RNA-protein recruitment aptamer, e.g., a MS2 aptamer, which may be linked to a PEgRNA. Prime editor polypeptide components may be encoded by one or more polynucleotides in whole or in part. In some embodiments, a single polynucleotide, construct, or vector encodes the prime editor fusion protein. In some embodiments, multiple polynucleotides, constructs, or vectors each encode a polypeptide domain or portion of a domain of a prime editor, or a portion of a prime editor fusion protein. For example, a prime editor fusion protein may comprise an N-terminal portion fused to an intein-N and a C-terminal portion fused to an intein-C, each of which is individually encoded by an AAV vector.

### Prime Editor Nucleotide Polymerase Domain

[0245] In some embodiments, a prime editor comprises a nucleotide polymerase domain, e.g., a DNA polymerase domain. The DNA polymerase domain may be a wild-type DNA polymerase domain, a full-length DNA polymerase protein domain, or may be a functional mutant, a functional variant, or a functional fragment thereof. In some embodiments, the polymerase domain is a template dependent polymerase domain. For example, the DNA polymerase may rely on a template polynucleotide strand, e.g., the editing template sequence, for new strand DNA synthesis. In some embodiments, the prime editor comprises a DNA-dependent DNA polymerase. For example, a prime editor having a DNA-dependent DNA polymerase can synthesize a new single stranded DNA using a PEgRNA editing template that comprises a DNA sequence as a template. In such cases, the PEgRNA is a chimeric or hybrid PEgRNA, and comprising an extension arm comprising a DNA strand. The chimeric or hybrid PEgRNA may comprise an RNA portion (including the spacer and the gRNA core) and a DNA portion (the extension arm comprising the editing template that includes a strand of DNA).

[0246] The DNA polymerases can be wild type polymerases from eukaryotic, prokaryotic, archael, or viral organisms, and/or the polymerases may be modified by genetic engineering, mutagenesis, or directed evolution-based processes. The polymerases can be a T7 DNA polymerase, T5 DNA polymerase, T4 DNA polymerase, Klenow fragment DNA polymerase, DNA polymerase III and the like. The polymerases can be thermostable, and can include Taq, Tne, Tma, Pfu, Tfl, Tth, Stoffel fragment, VENT® and DEEPVENT® DNA polymerases, KOD, Tgo, JDF3, and mutants, variants and derivatives thereof.

[0247] For synthesis of longer nucleic acid molecules (e.g., nucleic acid molecules longer than about 3-5 Kb in length), at least two DNA polymerases can be employed. In certain embodiments, one of the polymerases can be substantially lacking a 3′ exonuclease activity and the other may have a 3′ exonuclease activity. Such pairings may include polymerases that are the same or different. Examples of DNA polymerases substantially lacking in 3′ exonuclease activity include, but are not limited to, Taq, Tne(exo-), Tma(exo-), Pfu(exo-), Pwo(exo-), exo-KOD and Tth DNA polymerases, and any functional mutants, functional variants and functional fragments thereof.

[0248] In some embodiments, the DNA polymerase is a bacteriophage polymerase, for example, a T4, T7, or phi29 DNA polymerase. In some embodiments, the DNA polymerase is an archaeal polymerase, for example, pol I type archaeal polymerase or a pol II type archaeal polymerase. In some embodiments, the DNA polymerase comprises a thermostable archaeal DNA polymerase. In some embodiments, the DNA polymerase comprises a eubacterial DNA polymerase, for example, Pol I, Pol II, or Pol III polymerase. In some embodiments, the DNA polymerase is a Pol I family DNA polymerase. In some embodiments, the DNA polymerase is a E. coli Pol I DNA polymerase. In some embodiments, the DNA polymerase is a Pol II family DNA polymerase. In some embodiments, the DNA polymerase is a Pyrococcus furiosus (Pfu) Pol II DNA polymerase. In some embodiments, the DNA polymerase is a Pol IV family DNA polymerase. In some embodiments, the DNA polymerase is an E. coli Pol IV DNA polymerase.

[0249] In some embodiments, the DNA polymerase comprises a eukaryotic DNA polymerase. In some embodiments, the DNA polymerase is a Pol-beta DNA polymerase, a Pol-lambda DNA polymerase, a Pol-sigma DNA polymerase, or a Pol-mu DNA polymerase. In some embodiments, the DNA polymerase is a Pol-alpha DNA polymerase. In some embodiments, the DNA polymerase is a POLA1 DNA polymerase. In some embodiments, the DNA polymerase is a POLA2 DNA polymerase. In some embodiments, the DNA polymerase is a Pol-delta DNA polymerase. In some embodiments, the DNA polymerase is a POLD1 DNA polymerase. In some embodiments, the DNA polymerase is a POLD2 DNA polymerase. In some embodiments, the DNA polymerase is a human POLD1 DNA polymerase. In some embodiments, the DNA polymerase is a human POLD2 DNA polymerase. In some embodiments, the DNA polymerase is a POLD3 DNA polymerase. In some embodiments, the DNA polymerase is a POLD4 DNA polymerase. In some embodiments, the DNA polymerase is a Pol-epsilon DNA polymerase. In some embodiments, the DNA polymerase is a POLE1 DNA polymerase. In some embodiments, the DNA polymerase is a POLE2 DNA polymerase. In some embodiments, the DNA polymerase is a POLE3 DNA polymerase. In some embodiments, the DNA polymerase is a Pol-eta (POLH) DNA polymerase. In some embodiments, the DNA polymerase is a Pol-iota (POLI) DNA polymerase. In some embodiments, the DNA polymerase is a Pol-kappa (POLK) DNA polymerase. In some embodiments, the DNA polymerase is a Rev1 DNA polymerase. In some embodiments, the DNA polymerase is a human Rev1 DNA polymerase. In some embodiments, the DNA polymerase is a viral DNA-dependent DNA polymerase. In some embodiments, the DNA polymerase is a B family DNA polymerases. In some embodiments, the DNA polymerase is a herpes simplex virus (HSV) UL30 DNA polymerase. In some embodiments, the DNA polymerase is a cytomegalovirus (CMV) UL54 DNA polymerase.

[0250] In some embodiments, the DNA polymerase is an archaeal polymerase. In some embodiments, the DNA polymerase is a Family B/pol I type DNA polymerase. For example, in some embodiments, the DNA polymerase is a homolog of Pfu from Pyrococcus furiosus. In some embodiments, the DNA polymerase is a pol II type DNA polymerase. For example, in some embodiments, the DNA polymerase is a homolog of P. furiosus DP1/DP2 2-subunit polymerase. In some embodiments, the DNA polymerase lacks 5′ to 3′ nuclease activity. Suitable DNA polymerases (pol I or pol II) can be derived from archaea with optimal growth temperatures that are similar to the desired assay temperatures.

[0251] In some embodiments, the DNA polymerase comprises a thermostable archaeal DNA polymerase. In some embodiments, the thermostable DNA polymerase is isolated or derived from Pyrococcus species (furiosus, species GB-D, woesii, abysii, horikoshii), Thermococcus species (kodakaraensis KOD1, litoralis, species 9 degrees North-7, species JDF-3, gorgonarius), Pyrodictium occultum, and Archaeoglobus fulgidus.

[0252] Polymerases may also be from eubacterial species. In some embodiments, the DNA polymerase is a Pol I family DNA polymerase. In some embodiments, the DNA polymerase is an E. coli Pol I DNA polymerase. In some embodiments, the DNA polymerase is a Pol II family DNA polymerase. In some embodiments, the DNA polymerase is a Pyrococcus furiosus (Pfu) Pol II DNA polymerase. In some embodiments, the DNA polymerase is a Pol III family DNA polymerase. In some embodiments, the DNA polymerase is a Pol IV family DNA polymerase. In some embodiments, the DNA polymerase is an E. coli Pol IV DNA polymerase. In some embodiments, the Pol I DNA polymerase is a DNA polymerase functional variant that lacks or has reduced 5′ to 3′ exonuclease activity.

[0253] Suitable thermostable pol I DNA polymerases can be isolated from a variety of thermophilic eubacteria, including Thermus species and Thermotoga maritima such as Thermus aquaticus (Taq), Thermus thermophilus (Tth) and Thermotoga maritima (Tma UITma).

[0254] In some embodiments, a prime editor comprises an RNA-dependent DNA polymerase domain, for example, a reverse transcriptase (RT). A RT or an RT domain may be a wild type RT domain, a full-length RT domain, or may be a functional mutant, a functional variant, or a functional fragment thereof. An RT or an RT domain of a prime editor may comprise a wild-type RT, or may be engineered or evolved to contain specific amino acid substitutions, truncations, or variants. An engineered RT may comprise sequences or amino acid changes different from a naturally occurring RT. In some embodiments, the engineered RT may have improved reverse transcription activity over a naturally occurring RT or RT domain. In some embodiments, the engineered RT may have improved features over a naturally occurring RT, for example, improved thermostability, reverse transcription efficiency, or target fidelity. In some embodiments, a prime editor comprising the engineered RT has improved prime editing efficiency over a prime editor having a reference naturally occurring RT.

[0255] In some embodiments, a prime editor comprises a virus RT, for example, a retrovirus RT. Non-limiting examples of virus RT include Moloney murine leukemia virus (M-MLV or MLVRT); human T-cell leukemia virus type 1 (HTLV-1) RT; bovine leukemia virus (BLV) RT; Rous Sarcoma Virus (RSV) RT; human immunodeficiency virus (HIV) RT, M-MFV RT, Avian Sarcoma-Leukosis Virus (ASLV) RT, Rous Sarcoma Virus (RSV) RT, Avian Myeloblastosis Virus (AMV) RT, Avian Erythroblastosis Virus (AEV) Helper Virus MCAV RT, Avian Myelocytomatosis Virus MC29 Helper Virus MCAV RT, Avian Reticuloendotheliosis Virus (REV-T) Helper Virus REV-A RT, Avian Sarcoma Virus UR2 Helper Virus (UR2AV) RT, Avian Sarcoma Virus Y73 Helper Virus YAV RT, Rous Associated Virus (RAV) RT, and Myeloblastosis Associated Virus (MAV) RT, all of which may be suitably used in the methods and composition described herein.

[0256] In some embodiments, the prime editor comprises a wild type M-MLV RT. An exemplary sequence of a wild type M-MLV RT is provided in SEQ ID NO: 4448.

[0257] In some embodiments, the prime editor comprises a M-MMLV RT comprising one or more of amino acid substitutions P51X, S67X, E69X, L139X, T197X, D200X, H204X, F209X, E302X, T306X, F309X, W313X, T330X, L345X, L435X, N454X, D524X, E562X, D583X, H594X, L603X, E607X, or D653X as compared to the wild type M-MMLV RT as set forth in SEQ ID NO: 4448, where X is any amino acid other than the wild type amino acid. In some embodiments, the prime editor comprises a M-MMLV RT comprising one or more of amino acid substitutions P51L, S67K, E69K, L139P, T197A, D200N, H204R, F209N, E302K, E302R, T306K, F309N, W313F, T330P, L345G, L435G, N454K, D524G, E562Q, D583N, H594Q, L603W, E607K, and D653N as compared to the wild type M-MMLV RT as set forth in SEQ ID NO: 4448. In some embodiments, the prime editor comprises a M-MLV RT comprising one or more amino acid substitutions D200N, T330P, L603W, T306K, and W313F as compared to the wild type M-MMLV RT as set forth in SEQ ID NO: 4448. In some embodiments, the prime editor comprises a M-MLV RT comprising amino acid substitutions D200N, T330P, L603W, T306K, and W313F as compared to the wild type M-MMLV RT as set forth in SEQ ID NO: 4448.

[0258] Exemplary wild type moloney murine leukemia virus reverse transcriptase:

[0259] TLNIEDEYRLHETSKEPDVSLGSTWLSDFPQAWAETGGMGLAVRQAPLIIPLKAT STPVSIKQYPMSQEARLGIKPHIQRLLDQGILVPCQSPWNTPLLPVKKPGTNDYRPVQDL REVNKRVEDIHPTVPNPYNLLSGLPPSHQWYTVLDLKDAFFCLRLHPTSQPLFAFEWRD PEMGISGQLTWTRLPQGFKNSPTLFDEALHRDLADFRIQHPDLILLQYVDDLLLAATSEL DCQQGTRALLQTLGNLGYRASAKKAQICQKQVKYLGYLLKEGQRWLTEARKETVMG QPTPKTPRQLREFLGTAGFCRLWIPGFAEMAAPLYPLTKTGTLFNWGPDQQKAYQEIKQ ALLTAPALGLPDLTKPFELFVDEKQGYAKGVLTQKLGPWRRPVAYLSKKLDPVAAGWP PCLRMVAAIAVLTKDAGKLTMGQPLVILAPHAVEALVKQPPDRWLSNARMTHYQALL LDTDRVQFGPVVALNPATLLPLPEEGLQHNCLDILAEAHGTRPDLTDQPLPDADHTWYT DGSSLLQEGQRKAGAAVTTETEVIWAKALPAGTSAQRAELIALTQALKMAEGKKLNVY TDSRYAFATAHIHGEIYRRRGLLTSEGKEIKNKDEILALLKALFLPKRLSIIHCPGHQKGH SAEARGNRMADQAARKAAITETPDTSTLLIENSSP (SEQ ID NO: 4448). In some embodiments, an RT variant may be a functional fragment of a reference RT that have 1, 2, 3, 4, 5, 6, 7, 8, 9, 10, 11, 12, 13, 14, 15, 16, 17, 18, 19, 20, 21, 22, 21, 24, 25, 26, 27, 28, 29, 30, 31, 32, 33, 34, 35, 36, 37, 38, 39, 40, 41, 42, 43, 44, 45, 46, 47, 48, 49, 50, or up to 100, or up to 200, or up to 300, or up to 400, or up to 500 or more amino acid changes compared to a reference RT, e.g., a wild type RT. In some embodiments, the RT variant comprises a fragment of a reference RT, e.g., a wild type RT, such that the fragment is about 70% identical, about 80% identical, about 90% identical, about 95% identical, about 96% identical, about 97% identical, about 98% identical, about 99% identical, about 99.5% identical, or about 99.9% identical to the corresponding fragment of the reference RT. In some embodiments, the fragment is 30%, 35%, 40%, 45%, 50%, 55%, 60%, 65%, 70%, 75%, 80%, 85%, 90%, 95% identical, 96%, 97%, 98%, 99%, or 99.5% of the amino acid length of a corresponding wild type RT (M-MLV reverse transcriptase) (e.g., SEQ ID NO: 4448).

[0260] In some embodiments, the RT functional fragment is at least 100 amino acids in length. In some embodiments, the fragment is at least 100, 150, 200, 250, 300, 350, 400, 450, 500, 550, or up to 600 or more amino acids in length.

[0261] In still other embodiments, the functional RT variant is truncated at the N-terminus or the C-terminus, or both, by a certain number of amino acids which results in a truncated variant which still retains sufficient DNA polymerase function. In some embodiments, the RT truncated variant has a truncation of at least 1, at least 2, at least 3, at least 4, at least 5, at least 6, at least 7, at least 8, at least 9, at least 10, at least 11, at least 12, at least 13, at least 14, at least 15, at least 16, at least 17, at least 18, at least 19, at least 20, at least 21, at least 22, at least 23, at least 24, at least 25, at least 30, 40, 50, 60, 70, 80, 90, 100, 110, 120, 130, 140, 150, 160, 170, 180, 190, 200, 210, 220, 230, 240, or 250 amino acids at the N-terminal end compared to a reference RT, e.g., a wild type RT. In some embodiments, the reference RT is a wild type M-MLV RT. In other embodiments, the RT truncated variant has a truncation of at least 1, at least 2, at least 3, at least 4, at least 5, at least 6, at least 7, at least 8, at least 9, at least 10, at least 11, at least 12, at least 13, at least 14, at least 15, at least 16, at least 17, at least 18, at least 19, at least 20, at least 21, at least 22, at least 23, at least 24, at least 25, at least 30, 40, 50, 60, 70, 80, 90, 100, 110, 120, 130, 140, 150, 160, 170, 180, 190, 200, 210, 220, 230, 240, or 250 amino acids at the C-terminal end compared to a reference RT, e.g., a wild type RT. In some embodiments, the reference RT is a wild type M-MLV RT. In still other embodiments, the RT truncated variant has a truncation at the N-terminal and the C-terminal end compared to a reference RT, e.g., a wild type RT. In some embodiments, the N-terminal truncation and the C-terminal truncation are of the same length. In some embodiments, the N-terminal truncation and the C-terminal truncation are of different lengths.

[0262] For example, the prime editors disclosed herein may include a functional variant of a wild type M-MLV reverse transcriptase. In some embodiments, the prime editor comprises a functional variant of a wild type M-MLV RT, wherein the functional variant of M-MLV RT is truncated after amino acid position 502 compared to a wild type M-MLV RT as set forth in SEQ ID NO: 4448. In some embodiments, the functional variant of M-MLV RT further comprises a D200X, T306X, W313X, and/or T330X amino acid substitution compared to compared to a wild type M-MLV RT as set forth in SEQ ID NO: 4448, wherein X is any amino acid other than the original amino acid. In some embodiments, the functional variant of M-MLV RT further comprises a D200N, T306K, W313F, and/or T330P amino acid substitution compared to compared to a wild type M-MLV RT as set forth in SEQ ID NO: 4448, wherein X is any amino acid other than the original amino acid. A nucleic acid sequence encoding a prime editor comprising this truncated RT is 522 nt smaller than a nucleic acid sequence encoding a prime editor comprising a full-length M-MLV RT, and therefore makes its potentially useful for applications where delivery of the DNA sequence is challenging due to its size (i.e., adeno-associated virus and lentivirus delivery). In some embodiments, a prime editor comprises a M-MLV RT variant, wherein the M-MLV RT consists of the following amino acid sequence:

(SEQ ID NO: 7022)
TLNIEDEYRLHETSKEPDVSLGSTWLSDFPQAWAETGGMGLAVRQAPLII
PLKATSTPVSIKQYPMSQEARLGIKPHIQRLLDQGILVPCQSPWNTPLLP
VKKPGTNDYRPVQDLREVNKRVEDIHPTVPNPYNLLSGLPPSHQWYTVLD
LKDAFFCLRLHPTSQPLFAFEWRDPEMGISGQLTWTRLPQGFKNSPTLFN
EALHRDLADFRIQHPDLILLQYVDDLLLAATSELDCQQGTRALLQTLGNL
GYRASAKKAQICQKQVKYLGYLLKEGQRWLTEARKETVMGQPTPKTPRQL
REFLGKAGFCRLFIPGFAEMAAPLYPLTKPGTLFNWGPDQQKAYQEIKQA
LLTAPALGLPDLTKPFELFVDEKQGYAKGVLTQKLGPWRRPVAYLSKKLD
PVAAGWPPCLRMVAAIAVLTKDAGKLTMGQPLVILAPHAVEALVKQPPDR
WLSNARMTHYQALLLDTDRVQFGPVVALNPATLLPLPEEGLQHNCLDNSR
LIN.

[0263] In some embodiments, a prime editor comprises a eukaryotic RT, for example, a yeast, drosophila, rodent, or primate RT. In some embodiments, the prime editor comprises a Group II intron RT, for example, a. Geobacillus stearothermophilus Group II Intron (GsI-IIC) RT or a Eubacterium rectale group II intron (Eu.re.12) RT. In some embodiments, the prime editor comprises a retron RT.

### Programmable DNA Binding Domain

[0264] In some embodiments, the DNA-binding domain of a prime editor is a programmable DNA binding domain. A programmable DNA binding domain refers to a protein domain that is designed to bind a specific nucleic acid sequence, e.g., a target DNA or a target RNA. In some embodiments, the DNA-binding domain is a polynucleotide programmable DNA-binding domain that can associate with a guide polynucleotide (e.g., a PEgRNA) that guides the DNA-binding domain to a specific DNA sequence, e.g., a search target sequence in a target gene. In some embodiments, the DNA-binding domain comprises a Clustered Regularly Interspaced Short Palindromic Repeats (CRISPR) Associated (Cas) protein. A Cas protein may comprise any Cas protein described herein or a functional fragment or functional variant thereof. In some embodiments, a DNA-binding domain may also comprise a zinc-finger protein domain. In other cases, a DNA-binding domain comprises a transcription activator-like effector domain (TALE). In some embodiments, the DNA-binding domain comprises a DNA nuclease. For example, the DNA-binding domain of a prime editor may comprise an RNA-guided DNA endonuclease, e.g., a Cas protein. In some embodiments, the DNA-binding domain comprises a zinc finger nuclease (ZFN) or a transcription activator like effector domain nuclease (TALEN), where one or more zinc finger motifs or TALE motifs are associated with one or more nucleases, e.g., a Fok I nuclease domain.

[0265] In some embodiments, the DNA-binding domain comprise a nuclease activity. In some embodiments, the DNA-binding domain of a prime editor comprises an endonuclease domain having single strand DNA cleavage activity. For example, the endonuclease domain may comprise a FokI nuclease domain. In some embodiments, the DNA-binding domain of a prime editor comprises a nuclease having full nuclease activity. In some embodiments, the DNA-binding domain of a prime editor comprises a nuclease having modified or reduced nuclease activity as compared to a wild type endonuclease domain. For example, the endonuclease domain may comprise one or more amino acid substitutions as compared to a wild type endonuclease domain. In some embodiments, the DNA-binding domain of a prime editor has nickase activity. In some embodiments, the DNA-binding domain of a prime editor comprises a Cas protein domain that is a nickase. In some embodiments, compared to a wild type Cas protein, the Cas nickase comprises one or more amino acid substitutions in a nuclease domain that reduces or abolishes its double strand nuclease activity but retains DNA binding activity. In some embodiments, the Cas nickase comprises an amino acid substitution in a HNH domain. In some embodiments, the Cas nickase comprises an amino acid substitution in a RuvC domain.

[0266] In some embodiments, the DNA-binding domain comprises a CRISPR associated protein (Cas protein) domain. A Cas protein may be a Class 1 or a Class 2 Cas protein. A Cas protein can be a type I, type II, type III, type IV, type V Cas protein, or a type VI Cas protein. Non-limiting examples of Cas proteins include Cas9, Cas12a (Cpf1), Cas12e (CasX), Cas12d (CasY), Cas12b1 (C2c1), Cas12b2, Cas12c (C2c3), C2c4, C2c8, C2c5, C2c10, C2c9, Cas14a, Cas14b, Cas14c, Cas14d, Cas14e, Cas14f, Cas14g, Cas14h, Cas14u, Cns2, Cas Φ, and homologs, functional fragments, or modified versions thereof. A Cas protein can be a chimeric Cas protein that is fused to other proteins or polypeptides. A Cas protein can be a chimera of various Cas proteins, for example, comprising domains of Cas proteins from different organisms.

[0267] A Cas protein, e.g., Cas9, can be from any suitable organism. In some aspects, the organism is Streptococcus pyogenes (S. pyogenes). In some aspects, the organism is Staphylococcus aureus (S. aureus). In some aspects, the organism is Streptococcus thermophilus (S. thermophilus). In some embodiments, the organism is Staphylococcus lugdunensis.

[0268] A Cas protein, e.g., Cas9, can be a wild type or a modified form of a Cas protein. A Cas protein, e.g., Cas9, can be a nuclease active variant, nuclease inactive variant, a nickase, or a functional variant or functional fragment of a wild type Cas protein. A Cas protein, e.g., Cas9, can comprise an amino acid change such as a deletion, insertion, substitution, fusion, chimera, or any combination thereof relative to a wild-type version of the Cas protein. A Cas protein can be a polypeptide with at least about 50%, 60%, 70%, 80%, 90%, 91%, 92%, 93%, 94%, 95%, 96%, 97%, 98%, 99%, or 100% sequence identity or sequence similarity to a wild type exemplary Cas protein.

[0269] A Cas protein, e.g., Cas9, may comprise one or more domains. Non-limiting examples of Cas domains include, guide nucleic acid recognition and/or binding domain, nuclease domains (e.g., DNase or RNase domains, RuvC, HNH), DNA binding domain, RNA binding domain, helicase domains, protein-protein interaction domains, and dimerization domains. In various embodiments, a Cas protein comprises a guide nucleic acid recognition and/or binding domain can interact with a guide nucleic acid, and one or more nuclease domains that comprise catalytic activity for nucleic acid cleavage.

[0270] In some embodiments, a Cas protein, e.g., Cas9, comprises one or more nuclease domains. A Cas protein can comprise an amino acid sequence having at least about 50%, 60%, 70%, 80%, 90%, 91%, 92%, 93%, 94%, 95%, 96%, 97%, 98%, 99%, or 100% sequence identity to a nuclease domain (e.g., RuvC domain, HNH domain) of a wild-type Cas protein. In some embodiments, a Cas protein comprises a single nuclease domain. For example, a Cpf1 may comprise a RuvC domain but lacks HNH domain. In some embodiments, a Cas protein comprises two nuclease domains, e.g., a Cas9 protein can comprise an HNH nuclease domain and a RuvC nuclease domain.

[0271] In some embodiments, a prime editor comprises a Cas protein, e.g., Cas9, wherein all nuclease domains of the Cas protein are active. In some embodiments, a prime editor comprises a Cas protein having one or more inactive nuclease domains. One or a plurality of the nuclease domains (e.g., RuvC, HNH) of a Cas protein can be deleted or mutated so that they are no longer functional or comprise reduced nuclease activity. In some embodiments, a Cas protein, e.g., Cas9, comprising mutations in a nuclease domain has reduced (e.g., nickase) or abolished nuclease activity while maintaining its ability to target a nucleic acid locus at a search target sequence when complexed with a guide nucleic acid, e.g., a PEgRNA.

[0272] In some embodiments, a prime editor comprises a Cas nickase that can bind to the target gene in a sequence-specific manner and generate a single-strand break at a protospacer within double-stranded DNA in the target gene, but not a double-strand break. For example, the Cas nickase can cleave the edit strand or the non-edit strand of the target gene, but may not cleave both. In some embodiments, a prime editor comprises a Cas nickase comprising two nuclease domains (e.g., Cas9), with one of the two nuclease domains modified to lack catalytic activity or deleted. In some embodiments, the Cas nickase of a prime editor comprises a nuclease inactive RuvC domain and a nuclease active HNH domain. In some embodiments, the Cas nickase of a prime editor comprises a nuclease inactive HNH domain and a nuclease active RuvC domain. In some embodiments, a prime editor comprises a Cas9 nickase having an amino acid substitution in the RuvC domain. In some embodiments, the Cas9 nickase comprises a D10X amino acid substitution compared to a wild type S. pyogenes Cas9, wherein X is any amino acid other than D. In some embodiments, a prime editor comprises a Cas9 nickase having an amino acid substitution in the HNH domain. In some embodiments, the Cas9 nickase comprises a H840X amino acid substitution compared to a wild type S. pyogenes Cas9, wherein X is any amino acid other than H.

[0273] In some embodiments, a prime editor comprises a Cas protein that can bind to the target gene in a sequence-specific manner but lacks or has abolished nuclease activity and may not cleave either strand of a double stranded DNA in a target gene. Abolished activity or lacking activity can refer to an enzymatic activity less than 1%, less than 2%, less than 3%, less than 4%, less than 5%, less than 6%, less than 7%, less than 8%, less than 9%, or less than 10% activity compared to a wild-type exemplary activity (e.g., wild-type Cas9 nuclease activity). In some embodiments, a Cas protein of a prime editor completely lacks nuclease activity. A nuclease, e.g., Cas9, that lacks nuclease activity may be referred to as nuclease inactive or “nuclease dead” (abbreviated by “d”). A nuclease dead Cas protein (e.g., dCas, dCas9) can bind to a target polynucleotide but may not cleave the target polynucleotide. In some aspects, a dead Cas protein is a dead Cas9 protein. In some embodiments, a prime editor comprises a nuclease dead Cas protein wherein all of the nuclease domains (e.g., both RuvC and HNH nuclease domains in a Cas9 protein; RuvC nuclease domain in a Cpf1 protein) are mutated to lack catalytic activity, or are deleted.

[0274] A Cas protein can be modified. A Cas protein, e.g., Cas9, can be modified to increase or decrease nucleic acid binding affinity, nucleic acid binding specificity, and/or enzymatic activity. Cas proteins can also be modified to change any other activity or property of the protein, such as stability. For example, one or more nuclease domains of the Cas protein can be modified, deleted, or inactivated, or a Cas protein can be truncated to remove domains that are not essential for the function of the protein or to optimize (e.g., enhance or reduce) the activity of the Cas protein.

[0275] A Cas protein can be a fusion protein. For example, a Cas protein can be fused to a cleavage domain, an epigenetic modification domain, a transcriptional regulation domain, or a polymerase domain. A Cas protein can also be fused to a heterologous polypeptide providing increased or decreased stability. The fused domain or heterologous polypeptide can be located at the N-terminus, the C-terminus, or internally within the Cas protein.

[0276] In some embodiments, the Cas protein of a prime editor is a Class 2 Cas protein. In some embodiments, the Cas protein is a type II Cas protein. In some embodiments, the Cas protein is a Cas9 protein, a modified version of a Cas9 protein, a Cas9 protein homolog, mutant, variant, or a functional fragment thereof. As used herein, a Cas9, Cas9 protein, Cas9 polypeptide or a Cas9 nuclease refers to an RNA guided nuclease comprising one or more Cas9 nuclease domains and a Cas9 gRNA binding domain having the ability to bind a guide polynucleotide, e.g., a PEgRNA. A Cas9 protein may refer to a wild type Cas9 protein from any organism or a homolog, ortholog, or paralog from any organisms; any functional mutants or functional variants thereof; or any functional fragments or domains thereof. In some embodiments, a prime editor comprises a full-length Cas9 protein. In some embodiments, the Cas9 protein can generally comprises at least about 50%, 60%, 70%, 80%, 90%, 100% sequence identity to a wild type reference Cas9 protein (e.g., Cas9 from S. pyogenes). In some embodiments, the Cas9 comprises an amino acid change such as a deletion, insertion, substitution, fusion, chimera, or any combination thereof as compared to a wild type reference Cas9 protein.

[0277] In some embodiments, a Cas9 protein may comprise a Cas9 protein from Streptococcus pyogenes (Sp), Staphylococcus aureus (Sa), Streptococcus canis (Sc), Streptococcus thermophilus (St), Staphylococcus lugdunensis (Slu), Neisseria meningitidis (Nm), Campylobacter jejuni (Cj), Francisella novicida (Fn), or Treponema denticola (Td), or any Cas9 homolog or ortholog from an organism known in the art. In some embodiments, a Cas9 polypeptide is a SpCas9 polypeptide. In some embodiments, a Cas9 polypeptide is a SaCas9 polypeptide. In some embodiments, a Cas9 polypeptide is a ScCas9 polypeptide. In some embodiments, a Cas9 polypeptide is a StCas9 polypeptide. In some embodiments, a Cas9 polypeptide is a SluCas9 polypeptide. In some embodiments, a Cas9 polypeptide is a NmCas9 polypeptide. In some embodiments, a Cas9 polypeptide is a CjCas9 polypeptide. In some embodiments, a Cas9 polypeptide is a FnCas9 polypeptide. In some embodiments, a Cas9 polypeptide is a TdCas9 polypeptide. In some embodiments, a Cas9 polypeptide is a chimera comprising domains from two or more of the organisms described herein or those known in the art. In some embodiments, a Cas9 polypeptide is a Cas9 polypeptide from Streptococcus macacae. In some embodiments, a Cas9 polypeptide is a Cas9 polypeptide generated by replacing a PAM interaction domain of a SpCas9 with that of a Streptococcus macacae Cas9 (Spy-mac Cas9).

[0278] An exemplary Streptococcus pyogenes Cas9 (SpCas9) amino acid sequence is provided in SEQ ID NO: 4449.

[0279] Exemplary Streptococcus pyogenes Cas9 (SpCas9) amino acid sequence:

SEQ ID NO: 4449
[sequence omitted]

[0280] In some embodiments, a prime editor comprises a Cas9 protein from Staphylococcus lugdunensis (Slu Cas9). An exemplary amino acid sequence of a Slu Cas9 is provided in SEQ ID NO: 4450.

[0281] Exemplary Staphylococcus lugdunensis Cas9 (Slu Cas9) amino acid sequence WP_002460848.1:

(SEQ ID NO: 4450)
MKRNYILGLDIGITSVGYGIIDYETRDVIDAGVRLFKEANVENNE
GRRSKRGARRLKRRRRHRIQRVKKLLFDYNLLTDHSELSGINPYE
ARVKGLSQKLSEEEFSAALLHLAKRRGVHNVNEVEEDTGNELSTK
EQISRNSKALEEKYVAELQLERLKKDGEVRGSINRFKTSDYVKEA
KQLLKVQKAYHQLDQSFIDTYIDLLETRRTYYEGPGEGSPFGWKD
IKEWYEMLMGHCTYFPEELRSVKYAYNADLYNALNDLNNLVITRD
ENEKLEYYEKFQIIENVFKQKKKPTLKQIAKEILVNEEDIKGYRV
TSTGKPEFTNLKVYHDIKDITARKEIIENAELLDQIAKILTIYQS
SEDIQEELTNLNSELTQEEIEQISNLKGYTGTHNLSLKAINLILD
ELWHTNDNQIAIFNRLKLVPKKVDLSQQKEIPTTLVDDFILSPVV
KRSFIQSIKVINAIIKKYGLPNDIIIELAREKNSKDAQKMINEMQ
KRNRQTNERIEEIIRTTGKENAKYLIEKIKLHDMQEGKCLYSLEA
IPLEDLLNNPFNYEVDHIIPRSVSFDNSFNNKVLVKQEEASKKGN
RTPFQYLSSSDSKISYETFKKHILNLAKGKGRISKTKKEYLLEER
DINRFSVQKDFINRNLVDTRYATRGLMNLLRSYFRVNNLDVKVKS
INGGFTSFLRRKWKFKKERNKGYKHHAEDALIIANADFIFKEWKK
LDKAKKVMENQMFEEKQAESMPEIETEQEYKEIFITPHQIKHIKD
FKDYKYSHRVDKKPNRELINDTLYSTRKDDKGNTLIVNNLNGLYD
KDNDKLKKLINKSPEKLLMYHHDPQTYQKLKLIMEQYGDEKNPLY
KYYEETGNYLTKYSKKDNGPVIKKIKYYGNKLNAHLDITDDYPNS
RNKVVKLSLKPYRFDVYLDNGVYKFVTVKNLDVIKKENYYEVNSK
CYEEAKKLKKISNQAEFIASFYNNDLIKINGELYRVIGVNNDLLN
RIEVNMIDITYREYLENMNDKRPPRIIKTIASKTQSIKKYSTDIL
GNLYEVKSKKHPQIIKK.

[0282] In some embodiments, a Cas9 protein comprises a variant Cas9 protein containing one or more amino acid substitutions. In some embodiments, a wildtype Cas9 protein comprises a RuvC domain and an HNH domain. In some embodiments, a prime editor comprises a nuclease active Cas9 protein that may cleave both strands of a double stranded target DNA sequence. In some embodiments, the nuclease active Cas9 protein comprises a functional RuvC domain and a functional HNH domain. In some embodiments, a prime editor comprises a Cas9 nickase that can bind to a guide polynucleotide and recognize a target DNA, but can cleave only one strand of a double stranded target DNA. In some embodiments, the Cas9 nickase comprises only one functional RuvC domain or one functional HNH domain. In some embodiments, a prime editor comprises a Cas9 that has a non-functional HNH domain and a functional RuvC domain. In some embodiments, the prime editor can cleave the edit strand (i.e., the PAM strand), but not the non-edit strand of a double stranded target DNA sequence. In some embodiments, a prime editor comprises a Cas9 having a non-functional RuvC domain that can cleave the target strand (i.e., the non-PAM strand), but not the edit strand of a double stranded target DNA sequence. In some embodiments, a prime editor comprises a Cas9 that has neither a functional RuvC domain nor a functional HNH domain, which may not cleave any strand of a double stranded target DNA sequence.

[0283] In some embodiments, a prime editor comprises a Cas9 having a mutation in the RuvC domain that reduces or abolishes the nuclease activity of the RuvC domain. In some embodiments, the Cas9 comprise a mutation at amino acid D10 as compared to a wild type SpCas9 as set forth in SEQ ID NO: 4449, or a corresponding mutation thereof. In some embodiments, the Cas9 comprise a D10A mutation as compared to a wild type SpCas9 as set forth in SEQ ID NO: 4449, or a corresponding mutation thereof. In some embodiments, the Cas9 polypeptide comprise a mutation at amino acid D10, G12, and/or G17 as compared to a wild type SpCas9 as set forth in SEQ ID NO: 4449, or a corresponding mutation thereof. In some embodiments, the Cas9 polypeptide comprise a D10A mutation, a G12A mutation, and/or a G17A mutation as compared to a wild type SpCas9 as set forth in SEQ ID NO: 4449, or a corresponding mutation thereof.

[0284] In some embodiments, a prime editor comprises a Cas9 polypeptide having a mutation in the HNH domain that reduces or abolishes the nuclease activity of the HNH domain. In some embodiments, the Cas9 polypeptide comprise a mutation at amino acid H840 as compared to a wild type SpCas9 as set forth in SEQ ID NO: 4449, or a corresponding mutation thereof. In some embodiments, the Cas9 polypeptide comprise a H840A mutation as compared to a wild type SpCas9 as set forth in SEQ ID NO: 4449, or a corresponding mutation thereof. In some embodiments, the Cas9 polypeptide comprise a mutation at amino acid E762, D839, H840, N854, N856, N863, H982, H983, A984, D986, and/or a A987 as compared to a wild type SpCas9 as set forth in SEQ ID NO: 4449, or a corresponding mutation thereof. In some embodiments, the Cas9 polypeptide comprise a E762A, D839A, H840A, N854A, N856A, N863A, H982A, H983A, A984A, and/or a D986A mutation as compared to a wild type SpCas9 as set forth in SEQ ID NO: 4449, or a corresponding mutation thereof.

[0285] In some embodiments, a prime editor comprises a Cas9 having one or more amino acid substitutions in both the HNH domain and the RuvC domain that reduce or abolish the nuclease activity of both the HNH domain and the RuvC domain. In some embodiments, the prime editor comprises a nuclease inactive Cas9, or a nuclease dead Cas9 (dCas9). In some embodiments, the dCas9 comprises a H840X substitution and a D10X mutation compared to a wild type SpCas9 as set forth in SEQ ID NO: 4449 or corresponding mutations thereof, wherein X is any amino acid other than H for the H840X substitution and any amino acid other than D for the D10X substitution. In some embodiments, the dead Cas9 comprises a H840A and a D10A mutation as compared to a wild type SpCas9 as set forth in SEQ ID NO: 4449, or corresponding mutations thereof.

[0286] In some embodiments, the N-terminal methionine is removed from a Cas9 nickase, or from any Cas9 variant, ortholog, or equivalent disclosed or contemplated herein. For example, methionine-minus Cas9 nickases include the following sequences, or a variant thereof having an amino acid sequence that has at least 80%, at least 85%, at least 90%, at least 95%, or at least 99% sequence identity thereto.

[0287] Besides dead Cas9 and Cas9 nickase variants, the Cas9 proteins used herein may also include other Cas9 variants having at least about 70% identical, at least about 80% identical, at least about 90% identical, at least about 95% identical, at least about 96% identical, at least about 97% identical, at least about 98% identical, at least about 99% identical, at least about 99.5% identical, or at least about 99.9% identical to any reference Cas9 protein, including any wild type Cas9, or mutant Cas9 (e.g., a dead Cas9 or Cas9 nickase), or fragment Cas9, or circular permutant Cas9, or other variant of Cas9 disclosed herein or known in the art. In some embodiments, a Cas9 variant may have 1, 2, 3, 4, 5, 6, 7, 8, 9, 10, 11, 12, 13, 14, 15, 16, 17, 18, 19, 20, 21, 22, 21, 24, 25, 26, 27, 28, 29, 30, 31, 32, 33, 34, 35, 36, 37, 38, 39, 40, 41, 42, 43, 44, 45, 46, 47, 48, 49, 50 or more amino acid changes compared to a reference Cas9, e.g., a wild type Cas9. In some embodiments, the Cas9 variant comprises a fragment of a reference Cas9 (e.g., a gRNA binding domain or a DNA-cleavage domain), such that the fragment is at least about 70% identical, at least about 80% identical, at least about 90% identical, at least about 95% identical, at least about 96% identical, at least about 97% identical, at least about 98% identical, at least about 99% identical, at least about 99.5% identical, or at least about 99.9% identical to the corresponding fragment of the reference Cas9, e.g., a wild type Cas9. In some embodiments, the fragment is at least 30%, at least 35%, at least 40%, at least 45%, at least 50%, at least 55%, at least 60%, at least 65%, at least 70%, at least 75%, at least 80%, at least 85%, at least 90%, at least 95% identical, at least 96%, at least 97%, at least 98%, at least 99%, or at least 99.5% of the amino acid length of a corresponding wild type Cas9.

[0288] In some embodiments, a Cas9 fragment is a functional fragment that retains one or more Cas9 activities. In some embodiments, the Cas9 fragment is at least 100 amino acids in length. In some embodiments, the fragment is at least 100, 150, 200, 250, 300, 350, 400, 450, 500, 550, 600, 650, 700, 750, 800, 850, 900, 950, 1000, 1050, 1100, 1150, 1200, 1250, or at least 1300 amino acids in length.

[0289] In some embodiments, a prime editor comprises a Cas protein, e.g., Cas9, containing modifications that allow altered PAM recognition. In prime editing using a Cas-protein-based prime editor, a “protospacer adjacent motif (PAM)”, PAM sequence, or PAM-like motif, may be used to refer to a short DNA sequence immediately following the protospacer sequence on the PAM strand of the target gene. In some embodiments, the PAM is recognized by the Cas nuclease in the prime editor during prime editing. In certain embodiments, the PAM is required for target binding of the Cas protein. The specific PAM sequence required for Cas protein recognition may depend on the specific type of the Cas protein. A PAM can be 1, 2, 3, 4, 5, 6, 7, 8, 9, 10 or more nucleotides in length. In some embodiments, a PAM is between 2-6 nucleotides in length. In some embodiments, the PAM can be a 5′ PAM (i.e., located upstream of the 5′ end of the protospacer). In other embodiments, the PAM can be a 3′ PAM (i.e., located downstream of the 5′ end of the protospacer). In some embodiments, the Cas protein of a prime editor recognizes a canonical PAM, for example, a SpCas9 recognizes 5′-NGG-3′ PAM. In some embodiments, the Cas protein of a prime editor has altered or non-canonical PAM specificities. Exemplary PAM sequences and corresponding Cas variants are described in Table 7 below. It should be appreciated that for each of the variants provided, the Cas protein comprises one or more of the amino acid substitutions as indicated compared to a wild type Cas protein sequence, for example, the Cas9 as set forth in SEQ ID NO: 4449. The PAM motifs as shown in Table 7 below are in the order of 5′ to 3′.

TABLE 7
Cas protein variants and corresponding PAM sequences

| Variant | PAM |
|---|---|
| spCas9 (wild type) | NGG, NGA, NAG, |
| | NGNGA |
| spCas9- VRVRFRR R1335V, L1111R, D1135V, | NG |
| G1218R, E1219F, A1322R, T1337R | |
| spCas9-VQR (D1135V, R1335Q, T1337R) | NGA |
| spCas9-EQR (D1135E, R1335Q, T1337R) | NGA |
| spCas9-VRER (D1135V, G1218R, R1335E, | NGCG |
| T1337R) | |
| spCas9-VRQR (D1135V, G1218R, R1335Q, | NGA |
| T1337R) | |
| Cas9-NG (L1111R, D1135V, G1218R, E1219F, | NGN |
| A1322R, T1337R, R1335V) | |
| SpG Cas9 (D1135L, S1136W, G1218K, E1219Q, | NGN |
| R1335Q, T1337R) | |
| SyRY Cas9 | NRN |
| (A61R, L1111R, N1317R, A1322R, and R1333P) | |
| xCas9 (E480K, E543D, E1219V, K294R, Q1256K, | NGN |
| A262T, S409I, M694I) | |
| SluCa9 | NNGG |
| sRGN1, sRGN2, sRGN4, sRGN3.1, sRGN3.3 | NNGG |
| saCas9 | NNGRRT, |
| | NNGRRN |
| saCas9-KKH (E782K, N968K, R1015H) | NNNRRT |
| spCas9-MQKSER (D1135M, S1136Q, G1218K, | NGCG/NGCN |
| E1219S, R1335E, T1337R) | |
| spCas9-LRKIQK (D1135L, S1136R, G1218K, | NGTN |
| E1219I, R1335Q, T1337K) | |
| spCas9-LRVSQK (D1135L, S1136R, G1218V, | NGTN |
| E1219S, R1335Q, T1337K) | |
| spCas9-LRVSQL(D1135L, S1136R, G1218V, | NGTN |
| E1219S, R1335Q, T1337L) | |
| Cpf1 | TTTV |
| Spy-Mac | NAA |
| NmCas9 | NNNNGATT |
| StCas9 | NNAGAAW |
| TdCas9 | NAAAAC |

[0290] In some embodiments, a prime editor comprises a Cas9 polypeptide comprising one or mutations selected from the group consisting of: A61R, L111R, D1135V, R221K, A262T, R324L, N394K, S4091, S4091, E427G, E480K, M495V, N497A, Y515N, K526E, F539S, E543D, R654L, R661A, R661L, R691A, N692A, M694A, M694I, Q695A, H698A, R753G, M763I, K848A, K890N, Q926A, K1003A, R1060A, L1111R, R1114G, D1135E, D1135L, D1135N, S1136W, V1139A, D1180G, G1218K, G1218R, G1218S, E1219Q, E1219V, E1219V, Q1221H, P1249S, E1253K, N1317R, A1320V, P1321S, A1322R, 11322V, D1332G, R1332N, A1332R, R1333K, R1333P, R1335L, R1335Q, R1335V, T1337N, T1337R, S1338T, H1349R, and any combinations thereof as compared to a wildtype SpCas9 polypeptide as set forth in SEQ ID NO: 4449.

[0291] In some embodiments, a prime editor comprises a SaCas9 polypeptide. In some embodiments, the SaCas9 polypeptide comprises one or more of mutations E782K, N968K, and R1015H as compared to a wild type SaCas9. In some embodiments, a prime editor comprises a FnCas9 polypeptide, for example, a wildtype FnCas9 polypeptide or a FnCas9 polypeptide comprising one or more of mutations E1369R, E1449H, or R1556A as compared to the wild type FnCas9. In some embodiments, a prime editor comprises a Sc Cas9, for example, a wild type ScCas9 or a ScCas9 polypeptide comprises one or more of mutations 1367K, G368D, 1369K, H371L, T375S, T376G, and T1227K as compared to the wild type ScCas9. In some embodiments, a prime editor comprises a St1 Cas9 polypeptide, a St3 Cas9 polypeptide, or a Slu Cas9 polypeptide.

[0292] In some embodiments, a prime editor comprises a Cas polypeptide that comprises a circular permutant Cas variant. For example, a Cas9 polypeptide of a prime editor may be engineered such that the N-terminus and the C-terminus of a Cas9 protein (e.g., a wild type Cas9 protein, or a Cas9 nickase) are topically rearranged to retain the ability to bind DNA when complexed with a guide RNA (gRNA). An exemplary circular permutant configuration may be N-terminus-[original C-terminus]-[original N-terminus]-C-terminus. Any of the Cas9 proteins described herein, including any variant, ortholog, or naturally occurring Cas9 or equivalent thereof, may be reconfigured as a circular permutant variant.

[0293] In various embodiments, the circular permutants of a Cas protein, e.g., a Cas9, may have the following structure: N-terminus-[original C-terminus]-[optional linker]-[original N-terminus]-C-terminus. In some embodiments, a circular permutant Cas9 comprises any one of the following structures:
[0294] N-terminus-[1268-1368]-[optional linker]-[1-1267]-C-terminus;
[0295] N-terminus-[1168-1368]-[optional linker]-[1-1167]-C-terminus;
[0296] N-terminus-[1068-1368]-[optional linker]-[1-1067]-C-terminus;
[0297] N-terminus-[968-1368]-[optional linker]-[1-967]-C-terminus;
[0298] N-terminus-[868-1368]-[optional linker]-[1-867]-C-terminus;
[0299] N-terminus-[768-1368]-[optional linker]-[1-767]-C-terminus;
[0300] N-terminus-[668-1368]-[optional linker]-[1-667]-C-terminus;
[0301] N-terminus-[568-1368]-[optional linker]-[1-567]-C-terminus;
[0302] N-terminus-[468-1368]-[optional linker]-[1-467]-C-terminus;
[0303] N-terminus-[368-1368]-[optional linker]-[1-367]-C-terminus;
[0304] N-terminus-[268-1368]-[optional linker]-[1-267]-C-terminus;
[0305] N-terminus-[168-1368]-[optional linker]-[1-167]-C-terminus;
[0306] N-terminus-[68-1368]-[optional linker]-[1-67]-C-terminus;
[0307] N-terminus-[10-1368]-[optional linker]-[1-9]-C-terminus, or the corresponding circular permutants of other Cas9 proteins (including other Cas9 orthologs, variants, etc.).

[0308] In some embodiments, a circular permutant Cas9 comprises any one of the following structures (amino acid positions as set forth in SEQ ID NO: 4449-1368 amino acids of UniProtKB-Q99ZW2:
[0309] N-terminus-[102-1368]-[optional linker]-[1-101]-C-terminus;
[0310] N-terminus-[1028-1368]-[optional linker]-[1-1027]-C-terminus;
[0311] N-terminus-[1041-1368]-[optional linker]-[1-1043]-C-terminus;
[0312] N-terminus-[1249-1368]-[optional linker]-[1-1248]-C-terminus; or
[0313] N-terminus-[1300-1368]-[optional linker]-[1-1299]-C-terminus, or the corresponding circular permutants of other Cas9 proteins (including other Cas9 orthologs, variants, etc).

[0314] In some embodiments, a circular permutant Cas9 comprises any one of the following structures (amino acid positions as set forth in SEQ ID NO: 4449-1368 amino acids of UniProtKB-Q99ZW2 N-terminus-[103-1368]-[optional linker]-[1-102]-C-terminus:
[0315] N-terminus-[1029-1368]-[optional linker]-[1-1028]-C-terminus;
[0316] N-terminus-[1042-1368]-[optional linker]-[1-1041]-C-terminus;
[0317] N-terminus-[1250-1368]-[optional linker]-[1-1249]-C-terminus; or
[0318] N-terminus-[1301-1368]-[optional linker]-[1-1300]-C-terminus, or the corresponding circular permutants of other Cas9 proteins (including other Cas9 orthologs, variants, etc).

[0319] In some embodiments, the circular permutant can be formed by linking a C-terminal fragment of a Cas9 to an N-terminal fragment of a Cas9, either directly or by using a linker, such as an amino acid linker. In some embodiments, The C-terminal fragment may correspond to the 95% or more of the C-terminal amino acids of a Cas9 (e.g., amino acids about 1300-1368 as set forth in SEQ ID No: 4449 or corresponding amino acid positions thereof), or the 90%, 85%, 80%, 75%, 70%, 65%, 60%, 55%, 50%, 45%, 40%, 35%, 30%, 25%, 20%, 15%, 10%, or 5% or more of the C-terminal amino acids of a Cas9 (e.g., SEQ ID No: 4449). The N-terminal portion may correspond to 95% or more of the N-terminal amino acids of a Cas9 (e.g., amino acids about 1-1300 as set forth in SEQ ID No: 4449 or corresponding amino acid positions thereof), or 90%, 85%, 80%, 75%, 70%, 65%, 60%, 55%, 50%, 45%, 40%, 35%, 30%, 25%, 20%, 15%, 10%, or 5% or more of the N terminal amino acids of a Cas9 (e.g., as set forth in SEQ ID No: 4449 or corresponding amino acid positions thereof).

[0320] In some embodiments, the circular permutant can be formed by linking a C-terminal fragment of a Cas9 to an N-terminal fragment of a Cas9, either directly or by using a linker, such as an amino acid linker. In some embodiments, the C-terminal fragment that is rearranged to the N-terminus includes or corresponds to the C-terminal 30% or less of the amino acids of a Cas9 (e.g., amino acids 1012-1368 as set forth in SEQ ID No: 4449 or corresponding amino acid positions thereof). In some embodiments, the C-terminal fragment that is rearranged to the N-terminus, includes or corresponds to the C-terminal 30%, 29%, 28%, 27%, 26%, 25%, 24%, 23%, 22%, 21%, 20%, 19%, 18%, 17%, 16%, 15%, 14%, 13%, 12%, 11%, 10%, 9%, 8%, 7%, 6%, 5%, 4%, 3%, 2%, or 1% of the amino acids of a Cas9 (e.g., as set forth in SEQ ID No: 4449 or corresponding amino acid positions thereof). In some embodiments, the C-terminal fragment that is rearranged to the N-terminus, includes or corresponds to the C-terminal 410 residues or less of a Cas9 (e.g., as set forth in SEQ ID No: 4449 or corresponding amino acid positions thereof). In some embodiments, the C-terminal portion that is rearranged to the N-terminus, includes or corresponds to the C-terminal 410, 400, 390, 380, 370, 360, 350, 340, 330, 320, 310, 300, 290, 280, 270, 260, 250, 240, 230, 220, 210, 200, 190, 180, 170, 160, 150, 140, 130, 120, 110, 100, 90, 80, 70, 60, 50, 40, 30, 20, or 10 residues of a Cas9 (e/g/as set forth in SEQ ID No: 4449 or corresponding amino acid positions thereof). In some embodiments, the C-terminal portion that is rearranged to the N-terminus includes or corresponds to the C-terminal 357, 341, 328, 120, or 69 residues of a Cas9 (e.g., as set forth in SEQ ID No: 4449 or corresponding amino acid positions thereof).

[0321] In other embodiments, circular permutant Cas9 variants may be a topological rearrangement of a Cas9 primary structure based on the following method, which is based on S. pyogenes Cas9 of SEQ ID NO: 4449: (a) selecting a circular permutant (CP) site corresponding to an internal amino acid residue of the Cas9 primary structure, which dissects the original protein into two halves: an N-terminal region and a C-terminal region; (b) modifying the Cas9 protein sequence (e.g., by genetic engineering techniques) by moving the original C-terminal region (comprising the CP site amino acid) to precede the original N-terminal region, thereby forming a new N-terminus of the Cas9 protein that now begins with the CP site amino acid residue. The CP site can be located in any domain of the Cas9 protein, including, for example, the helical-II domain, the RuvCIII domain, or the CTD domain. For example, the CP site may be located (as set forth in SEQ ID No: 4449 or corresponding amino acid positions thereof) at original amino acid residue 181, 199, 230, 270, 310, 1010, 1016, 1023, 1029, 1041, 1247, 1249, or 1282. Thus, once relocated to the N-terminus, original amino acid 181, 199, 230, 270, 310, 1010, 1016, 1023, 1029, 1041, 1247, 1249, or 1282 would become the new N-terminal amino acid. Nomenclature of these CP-Cas9 proteins may be referred to as Cas9-CP181, Cas9-CP199, Cas9-CP230, Cas9-CP270, Cas9-CP310, Cas9-CP1010, Cas9-CP1016, Cas9-CP1023, Cas9-CP1029, Cas9-CP1041, Cas9-CP1247, Cas9-CP1249, and Cas9-CP1282, respectively. This description is not meant to be limited to making CP variants from SEQ ID NO: 18, but may be implemented to make CP variants in any Cas9 sequence, either at CP sites that correspond to these positions, or at other CP sites entirely. This description is not meant to limit the specific CP sites in any way. Virtually any CP site may be used to form a CP-Cas9 variant.

[0322] In some embodiments, a prime editor comprises a Cas9 functional variant that is of smaller molecular weight than a wild type SpCas9 protein. In some embodiments, a smaller-sized Cas9 functional variant may facilitate delivery to cells, e.g., by an expression vector, nanoparticle, or other means of delivery. In certain embodiments, a smaller-sized Cas9 functional variant is a Class 2 Type II Cas protein. In certain embodiments, a smaller-sized Cas9 functional variant is a Class 2 Type V Cas protein. In certain embodiments, a smaller-sized Cas9 functional variant is a Class 2 Type VI Cas protein.

[0323] In some embodiments, a prime editor comprises a SpCas9 that is 1368 amino acids in length and has a predicted molecular weight of 158 kilodaltons. In some embodiments, a prime editor comprises a Cas9 functional variant or functional fragment that is less than 1300 amino acids, less than 1290 amino acids, than less than 1280 amino acids, less than 1270 amino acids, less than 1260 amino acid, less than 1250 amino acids, less than 1240 amino acids, less than 1230 amino acids, less than 1220 amino acids, less than 1210 amino acids, less than 1200 amino acids, less than 1190 amino acids, less than 1180 amino acids, less than 1170 amino acids, less than 1160 amino acids, less than 1150 amino acids, less than 1140 amino acids, less than 1130 amino acids, less than 1120 amino acids, less than 1110 amino acids, less than 1100 amino acids, less than 1050 amino acids, less than 1000 amino acids, less than 950 amino acids, less than 900 amino acids, less than 850 amino acids, less than 800 amino acids, less than 750 amino acids, less than 700 amino acids, less than 650 amino acids, less than 600 amino acids, less than 550 amino acids, or less than 500 amino acids, but at least larger than about 400 amino acids and retaining the one or more functions, e.g., DNA binding function, of the Cas9 protein.

[0324] In some embodiments, the Cas protein may include any CRISPR associated protein, including but not limited to, Cas12a, Cas12b1, Cas1, Cas1B, Cas2, Cas3, Cas4, Cas5, Cas6, Cas7, Cas8, Cas9 (also known as Csn1 and Csx12), Cas10, Csy1, Csy2, Csy3, Cse1, Cse2, Csc1, Csc2, Csa5, Csn2, Csm2, Csm3, Csm4, Csm5, Csm6, Cmr1, Cmr3, Cmr4, Cmr5, Cmr6, Csb1, Csb2, Csb3, Csx17, Csx14, Csx10, Csx16, CsaX, Csx3, Csx1, Csx15, Csf1, Csf2, Csf3, Csf4, homologs thereof, or modified versions thereof, and preferably comprising a nickase mutation (e.g., a mutation corresponding to the D10A mutation of the wild type Cas9 polypeptide of SEQ ID NO: 18). In various other embodiments, the napDNAbp can be any of the following proteins: a Cas9, a Cas12a (Cpf1), a Cas12e (CasX), a Cas12d (CasY), a Cas12b1 (C2c1), a Cas13a (C2c2), a Cas12c (C2c3), a GeoCas9, a CjCas9, a Cas12g, a Cas12h, a Cas12i, a Cas13b, a Cas13c, a Cas13d, a Cas14, a Csn2, an xCas9, an SpCas9-NG, a circularly permuted Cas9, or an Argonaute (Ago) domain, or a functional variant or fragment thereof.

TABLE 8
Exemplary Cas proteins

| | |
|---|---|
| Legacy nomenclature | Current nomenclature |

type II CRISPR-Cas enzymes

| | |
|---|---|
| Cas9 | same |

type V CRISPR-Cas enzymes

| | |
|---|---|
| Cpf1 | Cas12a |
| CasX | Cas12e |
| C2c1 | Cas12b1 |
| Cas12b2 | same |
| C2c3 | Cas12c |
| CasY | Cas12d |
| C2c4 | same |
| C2c8 | same |
| C2c5 | same |
| C2c10 | same |
| C2c9 | same |

type VI CRISPR-Cas enzymes

| | |
|---|---|
| C2c2 | Cas13a |
| Cas13d | same |
| C2c7 | Cas13c |
| C2c6 | Cas13b |

[0325] In some embodiments, a prime editor as described herein may comprise a Cas12a (Cpf1) polypeptide or functional variants thereof. In some embodiments, the Cas12a polypeptide comprises a mutation that reduces or abolishes the endonuclease domain of the Cas12a polypeptide. In some embodiments, the Cas12a polypeptide is a Cas12a nickase. In some embodiments, the Cas protein comprises an amino acid sequence that comprises at least about 50%, 60%, 70%, 80%, 90%, 91%, 92%, 93%, 94%, 95%, 96%, 97%, 98%, 99%, or 100% sequence identity to a naturally occurring Cas12a polypeptide.

[0326] In some embodiments, a prime editor comprises a Cas protein that is a Cas12b (C2c1) or a Cas12c (C2c3) polypeptide. In some embodiments, the Cas protein comprises an amino acid sequence that comprises at least about 50%, 60%, 70%, 80%, 90%, 91%, 92%, 93%, 94%, 95%, 96%, 97%, 98%, 99%, or 100% sequence identity to a naturally occurring Cas12b (C2c1) or Cas12c (C2c3) protein. In some embodiments, the Cas protein is a Cas12b nickase or a Cas12c nickase. In some embodiments, the Cas protein is a Cas12e, a Cas12d, a Cas13, Cas14a, Cas14b, Cas14c, Cas14d, Cas14e, Cas14f, Cas14g, Cas14h, Cas14u, or a CasΦ polypeptide. In some embodiments, the Cas protein comprises an amino acid sequence that comprises at least about 50%, 60%, 70%, 80%, 90%, 91%, 92%, 93%, 94%, 95%, 96%, 97%, 98%, 99%, or 100% sequence identity to a naturally-occurring Cas12e, Cas12d, Cas13, Cas14a, Cas14b, Cas14c, Cas14d, Cas14e, Cas14f, Cas14g, Cas14h, Cas14u, or Cas @ protein. In some embodiments, the Cas protein is a Cas12e, Cas12d, Cas13, or Cas @ nickase.

### Flap Endonuclease

[0327] In some embodiments, a prime editor further comprises additional polypeptide components, for example, a flap endonuclease (FEN, e.g., FEN1). In some embodiments, the flap endonuclease excises the 5′ single stranded DNA of the edit strand of the target gene and assists incorporation of the intended nucleotide edit into the target gene. In some embodiments, the FEN is linked or fused to another component. In some embodiments, the FEN is provided in trans, for example, as a separate polypeptide or polynucleotide encoding the FEN.

[0328] In some embodiments, a prime editor or prime editing composition comprises a flap nuclease. In some embodiments, the flap nuclease is a FEN1, or any FEN1 functional variant, functional mutant, or functional fragment thereof. In some embodiments, the flap nuclease is a TREX2, EXO1, or any other flap nuclease known in the art, or any functional variant, functional mutant, or functional fragment thereof. In some embodiments, the flap nuclease has amino acid sequence that is at least about 70% identical, at least about 80% identical, at least about 90% identical, at least about 95% identical, at least about 96% identical, at least about 97% identical, at least about 98% identical, at least about 99% identical, at least about 99.5% identical, or at least about 99.9% identical to any of the flap nucleases described herein or known in the art.

### Nuclear Localization Sequences

[0329] In some embodiments, a prime editor further comprises one or more nuclear localization sequence (NLS). In some embodiments, the NLS helps promote translocation of a protein into the cell nucleus. In some embodiments, a prime editor comprises a fusion protein, e.g., a fusion protein comprising a DNA binding domain and a DNA polymerase that comprises one or more NLSs. In some embodiments, one or more polypeptides of the prime editor are fused to or linked to one or more NLSs. In some embodiments, the prime editor comprises a DNA binding domain and a DNA polymerase domain that are provided in trans, wherein the DNA binding domain and/or the DNA polymerase domain is fused or linked to one or more NLSs.

[0330] In certain embodiments, a prime editor or prime editing complex comprises at least one NLS. In some embodiments, a prime editor or prime editing complex comprises at least two NLSs. In embodiments with at least two NLSs, the NLSs can be the same NLS, or they can be different NLSs.

[0331] In some instances, a prime editor may further comprise at least one nuclear localization sequence (NLS). In some cases, a prime editor may further comprise 1 NLS. In some cases, a prime editor may further comprise 2 NLSs. In other cases, a prime editor may further comprise 3 NLSs. In one case, a primer editor may further comprise more than 4, 5, 6, 7, 8, 9 or 10 NLSs.

[0332] In addition, the NLSs may be expressed as part of a prime editor complex. In some embodiments, a NLS can be positioned almost anywhere in a protein's amino acid sequence, and generally comprises a short sequence of three or more or four or more amino acids. The location of the NLS fusion can be at the N-terminus, the C-terminus, or positioned anywhere within a sequence of a prime editor or a component thereof (e.g., inserted between the DNA-binding domain and the DNA polymerase domain of a prime editor fusion protein, between the DNA binding domain and a linker sequence, between a DNA polymerase and a linker sequence, between two linker sequences of a prime editor fusion protein or a component thereof, in either N-terminus to C-terminus or C-terminus to N-terminus order). In some embodiments, a prime editor is fusion protein that comprises an NLS at the N terminus. In some embodiments, a prime editor is fusion protein that comprises an NLS at the C terminus. In some embodiments, a prime editor is fusion protein that comprises at least one NLS at both the N terminus and the C terminus. In some embodiments, the prime editor is a fusion protein that comprises two NLSs at the N terminus and/or the C terminus.

[0333] Any NLSs that are known in the art are also contemplated herein. The NLSs may be any naturally occurring NLS, or any non-naturally occurring NLS (e.g., an NLS with one or more mutations relative to a wild-type NLS). In some embodiments, the one or more NLSs of a prime editor comprise bipartite NLSs. In some embodiments, a nuclear localization signal (NLS) is predominantly basic. In some embodiments, the one or more NLSs of a prime editor are rich in lysine and arginine residues. In some embodiments, the one or more NLSs of a prime editor comprise proline residues. In some embodiments, a nuclear localization signal (NLS) comprises the sequence MDSLLMNRRKFLYQFKNVRWAKGRRETYLC (SEQ ID NO: 7023), KRTADGSEFESPKKKRKV (SEQ ID NO: 7024), KRTADGSEFEPKKKRKV (SEQ ID NO: 7025), NLSKRPAAIKKAGQAKKKK (SEQ ID NO: 7026), RQRRNELKRSF (SEQ ID NO: 7027), or NQSSNFGPMKGGNFGGRSSGPYGGGGQYFAKPRNQGGY (SEQ ID NO: 7028).

[0334] In some embodiments, a NLS is a monopartite NLS. For example, in some embodiments, a NLS is a SV40 large T antigen NLS PKKKRKV (SEQ ID NO: 7029). In some embodiments, a NLS is a bipartite NLS. In some embodiments, a bipartite NLS comprises two basic domains separated by a spacer sequence comprising a variable number of amino acids. In some embodiments, a NLS is a bipartite NLS. In some embodiments, a bipartite NLS consists of two basic domains separated by a spacer sequence comprising a variable number of amino acids. In some embodiments, the spacer amino acid sequence comprises the Xenopus nucleoplasmin sequence KRXXXXXXXXXXKKKL (SEQ ID NO: 4451) wherein X is any amino acid. In some embodiments, a NLS is a noncanonical sequences such as M9 of the hnRNP A1 protein, the influenza virus nucleoprotein NLS, and the yeast Gal4 protein NLS.

[0335] Other non-limiting examples of NLS sequences are provided in Table 9 below.

TABLE 9
Exemplary nuclear localization sequences

| | | SEQ |
|---|---|---|
| | | ID |
| Description | Sequence | NO: |
| NLS of SV40 | PKKKRKV | 7029 |
| Large T-AG | | |
| NLS | MKRTADGSEFESPKKKRKV | 7030 |
| NLS | MDSLLMNRRKFLYQFKNVR | 7023 |
| | WAKGRRETYLC | |
| NLS of | AVKRPAATKKAGQAKKKKLD | 7031 |
| Nucleoplasmin | | |
| NLS of EGL-13 | MSRRRKANPTKLSENAKKLA | 7032 |
| | KEVEN | |
| NLS of C-Myc | PAAKRVKLD | 7033 |
| NLS of Tus- | KLKIKRPVK | 7034 |
| protein | | |
| NLS of polyoma | VSRKRPRP | 7035 |
| large T-AG | | |
| NLS of Hepatitis | EGAPPAKRAR | 7036 |
| D virus | | |
| antigen | | |
| NLS of murine | PPQPKKKPLDGE | 7037 |
| p53 | | |
| NLS | SGGSKRTADGSE | 7038 |
| | FEPKKKRKV | |

### Additional Prime Editor Components

[0336] A prime editor described herein may comprise additional functional domains, for example, one or more domains that modify the folding, solubility, or charge of the prime editor. In some instances, the prime editor may comprise a solubility-enhancement (SET) domain.

[0337] In some embodiments, a split intein comprises two halves of an intein protein, which may be referred to as a N-terminal half of an intein, or intein-N, and a C-terminal half of an intein, or intein-C, respectively. In some embodiments, the intein-N and the intein-C may each be fused to a protein domain (the N-terminal and the C-terminal exteins). The exteins can be any protein or polypeptides, for example, any prime editor polypeptide component. In some embodiments, the intein-N and intein-C of a split intein can associate non-covalently to form an active intein and catalyze a-trans splicing reaction. In some embodiments, the trans splicing reaction excises the two intein sequences and links the two extein sequences with a peptide bond. As a result, the intein-N and the intein-C are spliced out, and a protein domain linked to the intein-N is fused to a protein domain linked to the intein-C essentially in same way as a contiguous intein does. In some embodiments, a split-intein is derived from a eukaryotic intein, a bacterial intein, or an archaeal intein. Preferably, the split intein so-derived will possess only the amino acid sequences essential for catalyzing trans-splicing reactions. In some embodiments, an intein-N or an intein-C further comprise one or more amino acid substitutions as compared to a wild type intein-N or wild type intein-C, for example, amino acid substitutions that enhances the trans-splicing activity of the split intein. In some embodiments, the intein-C comprises 4 to 7 contiguous amino acid residues, wherein at least 4 amino acids of which are from the last-strand of the intein from which it was derived. In some embodiments, the split intein is derived from a Ssp DnaE intein, e.g., Synechocytis sp. PCC6803, or any intein or split intein known in the art, or any functional variants or fragments thereof.

[0338] In some embodiments, a prime editor comprises one or more epitope tags. Non-limiting examples of epitope tags include histidine (His) tags, V5 tags, FLAG tags, influenza hemagglutinin (HA) tags, Myc tags, VSV-G tags, thioredoxin (Trx) tags, biotin carboxylase carrier protein (BCCP) tags, myc-tags, calmodulin-tags, polyhistidine tags, also referred to as histidine tags or His-tags, maltose binding protein (MBP)-tags, nus-tags, glutathione-S-transferase (GST)-tags, green fluorescent protein (GFP)-tags, thioredoxin-tags, S-tags, Softags (e.g., Softag 1, Softag 3), strep-tags, biotin ligase tags, FlAsH tags, V5 tags, and SBP-tags. Additional suitable sequences will be apparent to those of skill in the art. In some embodiments, the fusion protein comprises one or more His tags.

[0339] In some embodiments, a prime editor comprises one or more polypeptide domains encoded by one or more reporter genes. Examples of reporter genes include, but are not limited to, glutathione-5-transferase (GST), horseradish peroxidase (HRP), chloramphenicol acetyltransferase (CAT), beta-galactosidase, beta-glucuronidase, luciferase, green fluorescent protein (GFP), HcRed, DsRed, cyan fluorescent protein (CFP), yellow fluorescent protein (YFP), and autofluorescent proteins including blue fluorescent protein (BFP).

[0340] In some embodiments, a prime editor comprises one or more polypeptide domains that binds DNA molecules or binds other cellular molecules. Examples of binding proteins or domains include, but are not limited to, maltose binding protein (MBP), S-tag, Lex A DNA binding domain (DBD) fusions, GAL4 DNA binding domain fusions, and herpes simplex virus (HSV) BP16 protein fusions.

[0341] In some embodiments, a prime editor comprises a protein domain that is capable of modifying the intracellular half-life of the prime editor.

[0342] In some embodiments, a prime editing complex comprises a fusion protein comprising a DNA binding domain (e.g., Cas9 (H840A)) and a reverse transcriptase (e.g., a variant MMLV RT) having the following structure: [NLS]-[Cas9 (H840A)]-[linker]-[MMLV_RT(D200N) (T330P) (L603W) (T306K) (W313F)], and a desired PEgRNA. In some embodiments, the prime editing complex comprises a prime editor fusion protein that has the amino acid sequence of SEQ ID NO: 4440.

[0343] Polypeptides comprising components of a prime editor may be fused via peptide linkers, or may be provided in trans relevant to each other. For example, a reverse transcriptase may be expressed, delivered, or otherwise provided as an individual component rather than as a part of a fusion protein with the DNA binding domain. In such cases, components of the prime editor may be associated through non-peptide linkages or co-localization functions. In some embodiments, a prime editor further comprises additional components capable of interacting with, associating with, or capable of recruiting other components of the prime editor or the prime editing system. For example, a prime editor may comprise an RNA-protein recruitment polypeptide that can associate with an RNA-protein recruitment RNA aptamer. In some embodiments, an RNA-protein recruitment polypeptide can recruit, or be recruited by, a specific RNA sequence. Non limiting examples of RNA-protein recruitment polypeptide and RNA aptamer pairs include a MS2 coat protein and a MS2 RNA hairpin, a PCP polypeptide and a PP7 RNA hairpin, a Com polypeptide and a Com RNA hairpin, a Ku protein and a telomerase Ku binding RNA motif, and a Sm7 protein and a telomerase Sm7 binding RNA motif. In some embodiments, the prime editor comprises a DNA binding domain fused or linked to an RNA-protein recruitment polypeptide. In some embodiments, the prime editor comprises a DNA polymerase domain fused or linked to an RNA-protein recruitment polypeptide. In some embodiments, the DNA binding domain and the DNA polymerase domain fused to the RNA-protein recruitment polypeptide, or the DNA binding domain fused to the RNA-protein recruitment polypeptide and the DNA polymerase domain are co-localized by the corresponding RNA-protein recruitment RNA aptamer of the RNA-protein recruitment polypeptide. In some embodiments, the corresponding RNA-protein recruitment RNA aptamer fused or linked to a portion of the PEgRNA or ngRNA. For example, an MS2 coat protein fused or linked to the DNA polymerase and a MS2 hairpin installed on the PEgRNA for co-localization of the DNA polymerase and the RNA-guided DNA binding domain (e.g., a Cas9 nickase).

[0344] In some embodiments, a prime editor comprises a polypeptide domain, an MS2 coat protein (MCP), that recognizes an MS2 hairpin. In some embodiments, the nucleotide sequence of the MS2 hairpin (or equivalently referred to as the “MS2 aptamer”) is: GCCAACATGAGGATCACCCATGTCTGCAGGGCC (SEQ ID NO: 4446). In some embodiments, the amino acid sequence of the MCP is:

(SEQ ID NO: 4447)
GSASNFTQFVLVDNGGTGDVTVAPSNFANGVAEWISSNSRSQAYK
VTCSVRQSSAQNRKYTIKVEVPKVATQTVGGEELPVAGWRSYLN
MELTIPIFATNSDCELIVKAMQGLLKDGNPIPSAIAANSGIY

[0345] In certain embodiments, components of a prime editor are directly fused to each other. In certain embodiments, components of a prime editor are associated to each other via a linker.

[0346] As used herein, a linker can be any chemical group or a molecule linking two molecules or moieties, e.g., a DNA binding domain and a polymerase domain of a prime editor. In some embodiments, a linker is an organic molecule, group, polymer, or chemical moiety. In some embodiments, the linker comprises a non-peptide moiety. The linker may be as simple as a covalent bond, or it may be a polymeric linker many atoms in length, for example, a polynucleotide sequence. In certain embodiments, the linker is a covalent bond (e.g., a carbon-carbon bond, disulfide bond, carbon-heteroatom bond, etc.).

[0347] In certain embodiments, two or more components of a prime editor are linked to each other by a peptide linker. In some embodiments, a peptide linker is 5-100 amino acids in length, for example, 2, 3, 4, 5, 6, 7, 8, 9, 10, 11, 12, 13, 14, 15, 16, 17, 18, 19, 20, 21, 22, 23, 24, 25, 26, 27, 28, 29, 30, 30-35, 35-40, 40-45, 45-50, 50-60, 60-70, 70-80, 80-90, 90-100, 100-150, or 150-200 amino acids in length. In some embodiments, the peptide linker is 16 amino acids in length, 24 amino acids in length, 64 amino acids in length, or 96 amino acids in length.

[0348] In some embodiments, the linker comprises the amino acid sequence (GGGGS)n (SEQ ID NO: 7039), (G)n (SEQ ID NO: 7040), (EAAAK)n (SEQ ID NO: 7041), (GGS)n (SEQ ID NO: 7042), (SGGS)n (SEQ ID NO: 7043), (XP)n (SEQ ID NO: 7044), or any combination thereof, wherein n is independently an integer between 1 and 30, and wherein X is any amino acid. In some embodiments, the linker comprises the amino acid sequence (GGS) n, wherein n is 1, 3, or 7 (SEQ ID NO: 7045). In some embodiments, the linker comprises the amino acid sequence SGSETPGTSESATPES (SEQ ID NO: 7046). In some embodiments, the linker comprises the amino acid sequence SGGSSGGSSGSETPGTSESATPESSGGSSGGS (SEQ ID NO: 7047). In some embodiments, the linker comprises the amino acid sequence SGGSGGSGGS (SEQ ID NO: 7048). In some embodiments, the linker comprises the amino acid sequence SGGS (SEQ ID NO: 7049). In other embodiments, the linker comprises the amino acid sequence

(SEQ ID NO: 7050)
SGGSSGGSSGSETPGTSESATPESAGSYPYDVPDYAGSAAPAAKK
KKLDGSGSGGSSGG
S

[0349] In some embodiments, a linker comprises 1-100 amino acids. In some embodiments, the linker comprises the amino acid sequence SGSETPGTSESATPES (SEQ ID NO: 7046). In some embodiments, the linker comprises the amino acid sequence SGGSSGGSSGSETPGTSESATPESSGGSSGGS (SEQ ID NO: 7047). In some embodiments, the linker comprises the amino acid sequence SGGSGGSGGS (SEQ ID NO: 7048). In some embodiments, the linker comprises the amino acid sequence SGGS (SEQ ID NO: 7049). In some embodiments, the linker comprises the amino acid sequence GGSGGS (SEQ ID NO: 7051), GGSGGSGGS (SEQ ID NO: 7052),

(SEQ ID NO: 7050)
SGGSSGGSSGSETPGTSESATPESAGSYPYDVP
DYAGSAAPAAKKKKLDGSGSGGSSGGS,
or
(SEQ ID NO: 7053)
SGGSSGGSSGSETPGTSESATPESSGGSSGGSS

[0350] In certain embodiments, two or more components of a prime editor are linked to each other by a non-peptide linker. In some embodiments, the linker is a carbon-nitrogen bond of an amide linkage. In certain embodiments, the linker is a cyclic or acyclic, substituted or unsubstituted, branched or unbranched aliphatic or heteroaliphatic linker. In certain embodiments, the linker is polymeric (e.g., polyethylene, polyethylene glycol, polyamide, polyester, etc.). In certain embodiments, the linker comprises a monomer, dimer, or polymer of aminoalkanoic acid. In certain embodiments, the linker comprises an aminoalkanoic acid (e.g., glycine, ethanoic acid, alanine, beta-alanine, 3-aminopropanoic acid, 4-aminobutanoic acid, 5-pentanoic acid, etc.). In certain embodiments, the linker comprises a monomer, dimer, or polymer of aminohexanoic acid (Ahx). In certain embodiments, the linker is based on a carbocyclic moiety (e.g., cyclopentane, cyclohexane). In other embodiments, the linker comprises a polyethylene glycol moiety (PEG). In certain embodiments, the linker comprises an aryl or heteroaryl moiety. In certain embodiments, the linker is based on a phenyl ring. The linker may include functionalized moieties to facilitate attachment of a nucleophile (e.g., thiol, amino) from the peptide to the linker. Any electrophile may be used as part of the linker. Exemplary electrophiles include, but are not limited to, activated esters, activated amides, Michael acceptors, alkyl halides, aryl halides, acyl halides, and isothiocyanates.

[0351] Components of a prime editor may be connected to each other in any order. In some embodiments, the DNA binding domain and the DNA polymerase domain of a prime editor may be fused to form a fusion protein, or may be joined by a peptide or protein linker, in any order from the N terminus to the C terminus. In some embodiments, a prime editor comprises a DNA binding domain fused or linked to the C-terminal end of a DNA polymerase domain. In some embodiments, a prime editor comprises a DNA binding domain fused or linked to the N-terminal end of a DNA polymerase domain. In some embodiments, the prime editor comprises a fusion protein comprising the structure NH2-[DNA binding domain]-[polymerase]-COOH; or NH2-[polymerase]-[DNA binding domain]-COOH, wherein each instance of “]-[” indicates the presence of an optional linker sequence. In some embodiments, a prime editor comprises a fusion protein and a DNA polymerase domain provided in trans, wherein the fusion protein comprises the structure NH2-[DNA binding domain]-[RNA-protein recruitment polypeptide]-COOH. In some embodiments, a prime editor comprises a fusion protein and a DNA binding domain provided in trans, wherein the fusion protein comprises the structure NH2-[DNA polymerase domain]-[RNA-protein recruitment polypeptide]-COOH.

[0352] In some embodiments, a prime editor fusion protein, a polypeptide component of a prime editor, or a polynucleotide encoding the prime editor fusion protein or polypeptide component, may be split into an N-terminal half and a C-terminal half or polypeptides that encode the N-terminal half and the C terminal half, and provided to a target DNA in a cell separately. For example, in certain embodiments, a prime editor fusion protein may be split into a N-terminal and a C-terminal half for separate delivery in AAV vectors, and subsequently translated and colocalized in a target cell to reform the complete polypeptide or prime editor protein. In such cases, separate halves of a protein or a fusion protein may each comprise a split-intein to facilitate colocalization and reformation of the complete protein or fusion protein by the mechanism of intein facilitated trans splicing. In some embodiments, a prime editor comprises a N-terminal half fused to an intein-N, and a C-terminal half fused to an intein-C, or polynucleotides or vectors (e.g., AAV vectors) encoding each thereof. When delivered and/or expressed in a target cell, the intein-N and the intein-C can be excised via protein trans-splicing, resulting in a complete prime editor fusion protein in the target cell.

[0353] In some embodiments, a prime editor fusion protein comprises a Cas9 (H840A) nickase and a wild type M-MLV RT. In some embodiments, a prime editor fusion protein comprises one or more individual components of a prime editor fusion protein comprises a Cas9 (H840A) nickase and a wild type M-MLV RT. In some embodiments, a prime editor fusion protein comprises a Cas9 (H840A) nickase and a M-MLV RT that has amino acid substitutions D200N, T330P, T306K, W313F, and L603W compared to a wild type M-MLV RT. The amino acid sequence of an exemplary prime editor fusion protein comprises a Cas9 (H840A) nickase and an M-MLV RT that has amino acid substitutions D200N, T330P, T306K, W313F, and L603W and its individual components in shown in Table 4. In some embodiments, a prime editor fusion protein comprises the full amino acid sequence in Table 4. In some embodiments, a prime editor fusion protein comprises one or more individual components from Table 4.

[0354] In various embodiments, a prime editor fusion proteins comprises an amino acid sequence that is at least about 70% identical, at least about 80% identical, at least about 90% identical, at least about 95% identical, at least about 96% identical, at least about 97% identical, at least about 98% identical, at least about 99% identical, at least about 99.5% identical, or at least about 99.9% identical to a prime editor fusion protein sequence described herein or known in the art.

TABLE 10
Amino acid sequence of an exemplary Prime Editor
fusion protein and its individual components

| SEQ | | |
|---|---|---|
| ID | | |
| NO. | DESCRIPTION | SEQUENCE |
| 4440 | Prime Editor | MKRTADGSEFESPKKKRKVDKKYSIGLDIGTNSVGWAVITD |
| | fusion protein | EYKVPSKKFKVLGNTDRHSIKKNLIGALLFDSGETAEATR |
| | CAS9(H840A)- | LKRTARRRYTRRKNRICYLQEIFSNEMAKVDDSFFHRLEE |
| | MMLV_RT | SFLVEEDKKHERHPIFGNIVDEVAYHEKYPTIYHLRKKLV |
| | D200N T330P | DSTDKADLRLIYLALAHMIKFRGHFLIEGDLNPDNSDVDK |
| | L603W T306K | LFIQLVQTYNQLFEENPINASGVDAKAILSARLSKSRRLE |
| | W313F | NLIAQLPGEKKNGLFGNLIALSLGLTPNFKSNFDLAEDAK |
| | | LQLSKDTYDDDLDNLLAQIGDQYADLFLAAKNLSDAILLS |
| | | DILRVNTEITKAPLSASMIKRYDEHHQDLTLLKALVRQQL |
| | | PEKYKEIFFDQSKNGYAGYIDGGASQEEFYKFIKPILEKM |
| | | DGTEELLVKLNREDLLRKQRTFDNGSIPHQIHLGELHAIL |
| | | RRQEDFYPFLKDNREKIEKILTFRIPYYVGPLARGNSRFA |
| | | WMTRKSEETITPWNFEEVVDKGASAQSFIERMTNFDKNLP |
| | | NEKVLPKHSLLYEYFTVYNELTKVKYVTEGMRKPAFLSGE |
| | | QKKAIVDLLFKTNRKVTVKQLKEDYFKKIECFDSVEISGV |
| | | EDRFNASLGTYHDLLKIIKDKDFLDNEENEDILEDIVLTL |
| | | TLFEDREMIEERLKTYAHLFDDKVMKQLKRRRYTGWGRLS |
| | | RKLINGIRDKQSGKTILDFLKSDGFANRNFMQLIHDDSLT |
| | | FKEDIQKAQVSGQGDSLHEHIANLAGSPAIKKGILQTVKV |
| | | VDELVKVMGRHKPENIVIEMARENQTTQKGQKNSRERMKR |
| | | IEEGIKELGSQILKEHPVENTQLQNEKLYLYYLQNGRDMY |
| | | VDQELDINRLSDYDVDAIVPQSFLKDDSIDNKVLTRSDKN |
| | | RGKSDNVPSEEVVKKMKNYWRQLLNAKLITQRKFDNLTKA |
| | | ERGGLSELDKAGFIKRQLVETRQITKHVAQILDSRMNTKY |
| | | DENDKLIREVKVITLKSKLVSDFRKDFQFYKVREINNYHH |
| | | AHDAYLNAVVGTALIKKYPKLESEFVYGDYKVYDVRKMIA |
| | | KSEQEIGKATAKYFFYSNIMNFFKTEITLANGEIRKRPLI |
| | | ETNGETGEIVWDKGRDFATVRKVLSMPQVNIVKKTEVQTG |
| | | GFSKESILPKRNSDKLIARKKDWDPKKYGGFDSPTVAYSV |
| | | LVVAKVEKGKSKKLKSVKELLGITIMERSSFEKNPIDFLE |
| | | AKGYKEVKKDLIIKLPKYSLFELENGRKRMLASAGELQKG |
| | | NELALPSKYVNFLYLASHYEKLKGSPEDNEQKQLFVEQHK |
| | | HYLDEIIEQISEFSKRVILADANLDKVLSAYNKHRDKPIR |
| | | EQAENIIHLFTLTNLGAPAAFKYFDTTIDRKRYTSTKEVL |
| | | DATLIHQSITGLYETRIDLSQLGGDSGGSSGGSSGSETPG |
| | | TSESATPESSGGSSGGSSTLNIEDEYRLHETSKEPDVSLG |
| | | STWLSDFPQAWAETGGMGLAVRQAPLIIPLKATSTPVSIK |
| | | QYPMSQEARLGIKPHIQRLLDQGILVPCQSPWNTPLLPVK |
| | | KPGTNDYRPVQDLREVNKRVEDIHPTVPNPYNLLSGLPPS |
| | | HQWYTVLDLKDAFFCLRLHPTSQPLFAFEWRDPEMGISGQ |
| | | LTWTRLPQGFKNSPTLFNEALHRDLADFRIQHPDLILLQY |
| | | VDDLLLAATSELDCQQGTRALLQTLGNLGYRASAKKAQIC |
| | | QKQVKYLGYLLKEGQRWLTEARKETVMGQPTPKTPRQLRE |
| | | FLGKAGFCRLFIPGFAEMAAPLYPLTKPGTLFNWGPDQQK |
| | | AYQEIKQALLTAPALGLPDLTKPFELFVDEKQGYAKGVLT |
| | | QKLGPWRRPVAYLSKKLDPVAAGWPPCLRMVAAIAVLTKD |
| | | AGKLTMGQPLVILAPHAVEALVKQPPDRWLSNARMTHYQA |
| | | LLLDTDRVQFGPVVALNPATLLPLPEEGLQHNCLDILAEA |
| | | HGTRPDLTDQPLPDADHTWYTDGSSLLQEGQRKAGAAVTT |
| | | ETEVIWAKALPAGTSAQRAELIALTQALKMAEGKKLNVYT |
| | | DSRYAFATAHIHGEIYRRRGWLTSEGKEIKNKDEILALLK |
| | | ALFLPKRLSIIHCPGHQKGHSAEARGNRMADQAARKAAIT |
| | | ETPDTSTLLIENSSPSGGSKRTADGSEFEPKKKRKV |
| | | KEY: |
| | | NUCLEAR LOCALIZATION SEQUENCE (NLS) |
| | | CAS9(H840A) |
| | | 33-AMINO ACID LINKER |
| | | M-MLV REVERSE TRANSCRIPTASE |
| 4441 | N-terminal NLS | MKRTADGSEFESPKKKRKV |
| 4442 | CAS9 (H840A) | DKKYSIGLDIGTNSVGWAVITDEYKVPSKKFKVLGNTDRH |
| | (MET MINUS) | SIKKNLIGALLFDSGETAEATRLKRTARRRYTRRKNRICY |
| | | LQEIFSNEMAKVDDSFFHRLEESFLVEEDKKHERHPIFGN |
| | | IVDEVAYHEKYPTIYHLRKKLVDSTDKADLRLIYLALAHM |
| | | IKFRGHFLIEGDLNPDNSDVDKLFIQLVQTYNQLFEENPI |
| | | NASGVDAKAILSARLSKSRRLENLIAQLPGEKKNGLFGNL |
| | | IALSLGLTPNFKSNFDLAEDAKLQLSKDTYDDDLDNLLAQ |
| | | IGDQYADLFLAAKNLSDAILLSDILRVNTEITKAPLSASM |
| | | IKRYDEHHQDLTLLKALVRQQLPEKYKEIFFDQSKNGYAG |
| | | YIDGGASQEEFYKFIKPILEKMDGTEELLVKLNREDLLRK |
| | | QRTFDNGSIPHQIHLGELHAILRRQEDFYPFLKDNREKIE |
| | | KILTFRIPYYVGPLARGNSRFAWMTRKSEETITPWNFEEV |
| | | VDKGASAQSFIERMTNFDKNLPNEKVLPKHSLLYEYFTVY |
| | | NELTKVKYVTEGMRKPAFLSGEQKKAIVDLLFKTNRKVTV |
| | | KQLKEDYFKKIECFDSVEISGVEDRFNASLGTYHDLLKII |
| | | KDKDFLDNEENEDILEDIVLTLTLFEDREMIEERLKTYAH |
| | | LFDDKVMKQLKRRRYTGWGRLSRKLINGIRDKQSGKTILD |
| | | FLKSDGFANRNFMQLIHDDSLTFKEDIQKAQVSGQGDSLH |
| | | EHIANLAGSPAIKKGILQTVKVVDELVKVMGRHKPENIVI |
| | | EMARENQTTQKGQKNSRERMKRIEEGIKELGSQILKEHPV |
| | | ENTQLQNEKLYLYYLQNGRDMYVDQELDINRLSDYDVDAI |
| | | VPQSFLKDDSIDNKVLTRSDKNRGKSDNVPSEEVVKKMKN |
| | | YWRQLLNAKLITQRKFDNLTKAERGGLSELDKAGFIKRQL |
| | | VETRQITKHVAQILDSRMNTKYDENDKLIREVKVITLKSK |
| | | LVSDFRKDFQFYKVREINNYHHAHDAYLNAVVGTALIKK |
| | | YPKLESEFVYGDYKVYDVRKMIAKSEQEIGKATAKYFFYS |
| | | NIMNFFKTEITLANGEIRKRPLIETNGETGEIVWDKGRDF |
| | | ATVRKVLSMPQVNIVKKTEVQTGGFSKESILPKRNSDKLI |
| | | ARKKDWDPKKYGGFDSPTVAYSVLVVAKVEKGKSKKLKSV |
| | | KELLGITIMERSSFEKNPIDFLEAKGYKEVKKDLIIKLPK |
| | | YSLFELENGRKRMLASAGELQKGNELALPSKYVNFLYLAS |
| | | HYEKLKGSPEDNEQKQLFVEQHKHYLDEIIEQISEFSKRV |
| | | ILADANLDKVLSAYNKHRDKPIREQAENIIHLFTLTNLGA |
| | | PAAFKYFDTTIDRKRYTSTKEVLDATLIHQSITGLYETRI |
| | | DLSQLGGD |
| 4443 | linker between | SGGSSGGSSGSETPGTSESATPESSGGSSGGSS |
| | CAS9 domain | |
| | and RT domain | |
| | (33 amino acids) | |
| 4444 | MMLV_RT | TLNIEDEYRLHETSKEPDVSLGSTWLSDFPQAWAETGGMG |
| | D200N T330P | LAVRQAPLIIPLKATSTPVSIKQYPMSQEARLGIKPHIQR |
| | L603W T306K | LLDQGILVPCQSPWNTPLLPVKKPGTNDYRPVQDLREVNK |
| | W313F | RVEDIHPTVPNPYNLLSGLPPSHQWYTVLDLKDAFFCLRL |
| | | HPTSQPLFAFEWRDPEMGISGQLTWTRLPQGFKNSPTLFN |
| | | EALHRDLADFRIQHPDLILLQYVDDLLLAATSELDCQQGT |
| | | RALLQTLGNLGYRASAKKAQICQKQVKYLGYLLKEGQRWL |
| | | TEARKETVMGQPTPKTPRQLREFLGKAGFCRLFIPGFAEM |
| | | AAPLYPLTKPGTLFNWGPDQQKAYQEIKQALLTAPALGLP |
| | | DLTKPFELFVDEKQGYAKGVLTQKLGPWRRPVAYLSKKLD |
| | | PVAAGWPPCLRMVAAIAVLTKDAGKLTMGQPLVILAPHAV |
| | | EALVKQPPDRWLSNARMTHYQALLLDTDRVQFGPVVALNP |
| | | ATLLPLPEEGLQHNCLDILAEAHGTRPDLTDQPLPDADHT |
| | | WYTDGSSLLQEGQRKAGAAVTTETEVIWAKALPAGTSAQR |
| | | AELIALTQALKMAEGKKLNVYTDSRYAFATAHIHGEIYRR |
| | | RGWLTSEGKEIKNKDEILALLKALFLPKRLSIIHCPGHQK |
| | | GHSAEARGNRMADQAARKAAITETPDTSTLLIENSSP |
| 4445 | C- terminal NLS | SGGSKRTADGSEFEPKKKRKV |

### Prime Editing Compositions

[0355] Disclosed herein, in some embodiments, are compositions, systems, and methods using a prime editing composition. The term “prime editing composition” or “prime editing system” refers to compositions involved in the method of prime editing as described herein. A prime editing composition may include a prime editor, e.g., a prime editor fusion protein, and a PEgRNA. A prime editing composition may further comprise additional elements, such as second strand nicking ngRNAs. Components of a prime editing composition may be combined to form a complex for prime editing, or may be kept separately, e.g., for administration purposes.

[0356] In some embodiments, a prime editing composition comprises a prime editor fusion protein complexed with a PEgRNA and optionally complexed with a ngRNA. In some embodiments, the prime editing composition comprises a prime editor comprising a DNA binding domain and a DNA polymerase domain associated with each other through a PEgRNA. For example, the prime editing composition may comprise a prime editor comprising a DNA binding domain and a DNA polymerase domain linked to each other by an RNA-protein recruitment aptamer RNA sequence, which is linked to a PEgRNA. In some embodiments, a prime editing composition comprises a PEgRNA and a polynucleotide, a polynucleotide construct, or a vector that encodes a prime editor fusion protein.

[0357] In some embodiments, a prime editing composition comprises a PEgRNA, a ngRNA, and a polynucleotide, a polynucleotide construct, or a vector that encodes a prime editor fusion protein. In some embodiments, a prime editing composition comprises multiple polynucleotides, polynucleotide constructs, or vectors, each of which encodes one or more prime editing composition components. In some embodiments, the PEgRNA of a prime editing composition is associated with the DNA binding domain, e.g., a Cas9 nickase, of the prime editor. In some embodiments, the PEgRNA of a prime editing composition complexes with the DNA binding domain of a prime editor and directs the prime editor to the target DNA.

[0358] In some embodiments, a prime editing composition comprises one or more polynucleotides that encode prime editor components and/or PEgRNA or ngRNAs. In some embodiments, a prime editing composition comprises a polynucleotide encoding a fusion protein comprising a DNA binding domain and a DNA polymerase domain. In some embodiments, a prime editing composition comprises (i) a polynucleotide encoding a fusion protein comprising a DNA binding domain and a DNA polymerase domain, and (ii) a PEgRNA or a polynucleotide encoding the PEgRNA. In some embodiments, a prime editing composition comprises (i) a polynucleotide encoding a fusion protein comprising a DNA binding domain and a DNA polymerase domain, (ii) a PEgRNA or a polynucleotide encoding the PEgRNA, and (iii) an ngRNA or a polynucleotide encoding the ngRNA. In some embodiments, a prime editing composition comprises (i) a polynucleotide encoding a DNA binding domain of a prime editor, e.g., a Cas9 nickase, (ii) a polynucleotide encoding a DNA polymerase domain of a prime editor, e.g., a reverse transcriptase, and (iii) a PEgRNA or a polynucleotide encoding the PEgRNA. In some embodiments, a prime editing composition comprises (i) a polynucleotide encoding a DNA binding domain of a prime editor, e.g., a Cas9 nickase, (ii) a polynucleotide encoding a DNA polymerase domain of a prime editor, e.g., a reverse transcriptase, (iii) a PEgRNA or a polynucleotide encoding the PEgRNA, and (iv) an ngRNA or a polynucleotide encoding the ngRNA.

[0359] In some embodiments, the polynucleotide encoding the DNA biding domain or the polynucleotide encoding the DNA polymerase domain further encodes an additional polypeptide domain, e.g., an RNA-protein recruitment domain, such as a MS2 coat protein domain. In some embodiments, a prime editing composition comprises (i) a polynucleotide encoding a N-terminal half of a prime editor fusion protein and an intein-N and (ii) a polynucleotide encoding a C-terminal half of a prime editor fusion protein and an intein-C. In some embodiments, a prime editing composition comprises (i) a polynucleotide encoding a N-terminal half of a prime editor fusion protein and an intein-N (ii) a polynucleotide encoding a C-terminal half of a prime editor fusion protein and an intein-C, (iii) a PEgRNA or a polynucleotide encoding the PEgRNA, and/or (iv) an ngRNA or a polynucleotide encoding the ngRNA. In some embodiments, a prime editing composition comprises (i) a polynucleotide encoding a N-terminal portion of a DNA binding domain and an intein-N, (ii) a polynucleotide encoding a C-terminal portion of the DNA binding domain, an intein-C, and a DNA polymerase domain. In some embodiments, the DNA binding domain is a Cas protein domain, e.g., a Cas9 nickase. In some embodiments, the prime editing composition comprises (i) a polynucleotide encoding a N-terminal portion of a DNA binding domain and an intein-N, (ii) a polynucleotide encoding a C-terminal portion of the DNA binding domain, an intein-C, and a DNA polymerase domain, (iii) a PEgRNA or a polynucleotide encoding the PEgRNA, and/or (iv) a ngRNA or a polynucleotide encoding the ngRNA.

[0360] In some embodiments, a prime editing system comprises one or more polynucleotides encoding one or more prime editor polypeptides, wherein activity of the prime editing system may be temporally regulated by controlling the timing in which the vectors are delivered. For example, in some embodiments, a polynucleotide encoding the prime editor and a polynucleotide encoding a PEgRNA may be delivered simultaneously. For example, in some embodiments, a polynucleotide encoding the prime editor and a polynucleotide encoding a PEgRNA may be delivered sequentially.

[0361] In some embodiments, a polynucleotide encoding a component of a prime editing system may further comprise an element that is capable of modifying the intracellular half-life of the polynucleotide and/or modulating translational control. In some embodiments, the polynucleotide is a RNA, for example, an mRNA. In some embodiments, the half-life of the polynucleotide, e.g., the RNA may be increased. In some embodiments, the half-life of the polynucleotide, e.g., the RNA may be decreased. In some embodiments, the element may be capable of increasing the stability of the polynucleotide, e.g., the RNA. In some embodiments, the element may be capable of decreasing the stability of the polynucleotide, e.g., the RNA. In some embodiments, the element may be within the 3′ UTR of the RNA. In some embodiments, the element may include a polyadenylation signal (PA). In some embodiments, the element may include a cap, e.g., an upstream mRNA or PEgRNA end. In some embodiments, the RNA may comprise no PA such that it is subject to quicker degradation in the cell after transcription.

[0362] In some embodiments, the element may include at least one AU-rich element (ARE). The AREs may be bound by ARE binding proteins (ARE-BPs) in a manner that is dependent upon tissue type, cell type, timing, cellular localization, and environment. In some embodiments the destabilizing element may promote RNA decay, affect RNA stability, or activate translation. In some embodiments, the ARE may comprise 50 to 150 nucleotides in length. In some embodiments, the ARE may comprise at least one copy of the sequence AUUUA. In some embodiments, at least one ARE may be added to the 3′ UTR of the RNA. In some embodiments, the element may be a Woodchuck Hepatitis Virus Posttranscriptional Regulatory Element (WPRE). In further embodiments, the element is a modified and/or truncated WPRE sequence that is capable of enhancing expression from the transcript. In some embodiments, the WPRE or equivalent may be added to the 3′ UTR of the RNA. In some embodiments, the element may be selected from other RNA sequence motifs that are enriched in either fast- or slow-decaying transcripts. In some embodiments, the polynucleotide, e.g., a vector, encoding the PE or the PEgRNA may be self-destroyed via cleavage of a target sequence present on the polynucleotide, e.g., a vector. The cleavage may prevent continued transcription of a PE or a PEgRNA.

[0363] Polynucleotides encoding prime editing composition components can be DNA, RNA, or any combination thereof. In some embodiments, a polynucleotide encoding a prime editing composition component is an expression construct. In some embodiments, a polynucleotide encoding a prime editing composition component is a vector. In some embodiments, the vector is a DNA vector. In some embodiments, the vector is a plasmid. In some embodiments, the vector is a virus vector, e.g., a retroviral vector, adenoviral vector, lentiviral vector, herpesvirus vector, or an adeno-associated virus vector (AAV).

[0364] In some embodiments, polynucleotides encoding polypeptide components of a prime editing composition are codon optimized by replacing at least one codon (e.g., about or more than about 1, 2, 3, 4, 5, 10, 15, 20, 25, 50, or more codons) of the native sequence with codons that are more frequently or most frequently used in the genes of that host cell while maintaining the native amino acid sequence. In some embodiments, a polynucleotide encoding a polypeptide component of a prime editing composition are operably linked to one or more expression regulatory elements, for example, a promoter, a 3′ UTR, a 5′ UTR, or any combination thereof. In some embodiments, a polynucleotide encoding a prime editing composition component is a messenger RNA (mRNA). In some embodiments, the mRNA comprises a Cap at the 5′ end and/or a poly A tail at the 3′ end.

### Pharmaceutical Compositions

[0365] Disclosed herein are pharmaceutical compositions comprising any of the prime editing composition components, for example, prime editors, fusion proteins, polynucleotides encoding prime editor polypeptides, PEgRNAs, ngRNAs, and/or prime editing complexes described herein.

[0366] The term “pharmaceutical composition”, as used herein, refers to a composition formulated for pharmaceutical use. In some embodiments, the pharmaceutical composition further comprises a pharmaceutically acceptable carrier. In some embodiments, the pharmaceutical composition comprises additional agents, e.g., for specific delivery, increasing half-life, or other therapeutic compounds.

[0367] In some embodiments, a pharmaceutically-acceptable carrier comprises any vehicle, such as a liquid or solid filler, diluent, excipient, manufacturing aid (e.g., lubricant, talc magnesium, calcium or zinc stearate, or steric acid), or solvent encapsulating material, involved in carrying or transporting the compound from one site (e.g., the delivery site) of the body, to another site (e.g., organ, tissue or portion of the body). A pharmaceutically acceptable carrier is “acceptable” in the sense of being compatible with the other ingredients of the formulation and not injurious to the tissue of the subject (e.g., physiologically compatible, sterile, physiologic pH, etc.)

[0368] Formulations of the pharmaceutical compositions described herein can be prepared by any method known or hereafter developed in the art of pharmacology. In general, such preparatory methods include the step of bringing the active ingredient(s) into association with an excipient and/or one or more other accessory ingredients, and then, if necessary and/or desirable, shaping and/or packaging the product into a desired single- or multi-dose unit. Pharmaceutical formulations can additionally comprise a pharmaceutically acceptable excipient, which, as used herein, includes any and all solvents, dispersion media, diluents, or other liquid vehicles, dispersion or suspension aids, surface active agents, isotonic agents, thickening or emulsifying agents, preservatives, solid binders, lubricants and the like, as suited to the particular dosage form desired.

### Methods of Editing

[0369] The methods and compositions disclosed herein can be used to edit a target gene of interest by prime editing.

[0370] In some embodiments, the prime editing method comprises contacting a target gene, with a PEgRNA and a prime editor (PE) polypeptide described herein. In some embodiments, the target gene is double stranded, and comprises two strands of DNA complementary to each other. In some embodiments, the contacting with a PEgRNA and the contacting with a prime editor are performed sequentially. In some embodiments, the contacting with a prime editor is performed after the contacting with a PEgRNA. In some embodiments, the contacting with a PEgRNA is performed after the contacting with a prime editor. In some embodiments, the contacting with a PEgRNA, and the contacting with a prime editor are performed simultaneously. In some embodiments, the PEgRNA and the prime editor are associated in a complex prior to contacting a target gene.

[0371] In some embodiments, contacting the target gene with the prime editing composition results in binding of the PEgRNA to a target strand of the target gene. In some embodiments, contacting the target gene with the prime editing composition results in binding of the PEgRNA to a search target sequence on the target strand of the target gene upon contacting with the PEgRNA. In some embodiments, contacting the target gene with the prime editing composition results in binding of a spacer sequence of the PEgRNA to a search target sequence with the search target sequence on the target strand of the target gene upon said contacting of the PEgRNA.

[0372] In some embodiments, contacting the target gene with the prime editing composition results in binding of the prime editor to the target gene, e.g., the target gene, upon the contacting of the PE composition with the target gene. In some embodiments, the DNA binding domain of the PE associates with the PEgRNA. In some embodiments, the PE binds the target gene, directed by the PEgRNA. Accordingly, in some embodiments, the contacting of the target gene result in binding of a DNA binding domain of a prime editor of the target gene directed by the PEgRNA.

[0373] In some embodiments, contacting the target gene with the prime editing composition results in a nick in an edit strand of the target gene, by the prime editor upon contacting with the target gene, thereby generating a nicked on the edit strand of the target gene. In some embodiments, contacting the target gene with the prime editing composition results in a single-stranded DNA comprising a free 3′ end at the nick site of the edit strand of the target gene. In some embodiments, contacting the target gene with the prime editing composition results in a nick in the edit strand of the target gene by a DNA binding domain of the prime editor, thereby generating a single-stranded DNA comprising a free 3′ end at the nick site. In some embodiments, the DNA binding domain of the prime editor is a Cas domain. In some embodiments, the DNA binding domain of the prime editor is a Cas9. In some embodiments, the DNA binding domain of the prime editor is a Cas9 nickase.

[0374] In some embodiments, contacting the target gene with the prime editing composition results in hybridization of the PEgRNA with the 3′ end of the nicked single-stranded DNA, thereby priming DNA polymerization by a DNA polymerase domain of the prime editor. In some embodiments, the free 3′ end of the single-stranded DNA generated at the nick site hybridizes to a primer binding site sequence (PBS) of the contacted PEgRNA, thereby priming DNA polymerization. In some embodiments, the DNA polymerization is reverse transcription catalyzed by a reverse transcriptase domain of the prime editor. In some embodiments, the method comprises contacting the target gene with a DNA polymerase, e.g., a reverse transcriptase, as a part of a prime editor fusion protein or prime editing complex (in cis), or as a separate protein (in trans).

[0375] In some embodiments, contacting the target gene with the prime editing composition generates an edited single stranded DNA that is coded by the editing template of the PEgRNA by DNA polymerase mediated polymerization from the 3′ free end of the single-stranded DNA at the nick site. In some embodiments, the editing template of the PEgRNA comprises one or more intended nucleotide edits compared to endogenous sequence of the target gene. In some embodiments, the intended nucleotide edits are incorporated in the target gene, by excision of the 5′ single stranded DNA of the edit strand of the target gene generated at the nick site and DNA repair. In some embodiments, the intended nucleotide edits are incorporated in the target gene by excision of the editing target sequence and DNA repair. In some embodiments, excision of the 5″ single stranded DNA of the edit strand generated at the nick site is by a flap endonuclease. In some embodiments, the flap nuclease is FEN1. In some embodiments, the method further comprises contacting the target gene with a flap endonuclease. In some embodiments, the flap endonuclease is provided as a part of a prime editor fusion protein. In some embodiments, the flap endonuclease is provided in trans.

[0376] In some embodiments, contacting the target gene with the prime editing composition generates a mismatched heteroduplex comprising the edit strand of the target gene that comprises the edited single stranded DNA, and the unedited target strand of the target gene. Without being bound by theory, the endogenous DNA repair and replication may resolve the mismatched edited DNA to incorporate the nucleotide change(s) to form the desired edited target gene.

[0377] In some embodiments, the method further comprises contacting the target gene, with a nick guide (ngRNA) disclosed herein. In some embodiments, the ngRNA comprises a spacer that binds a second search target sequence on the edit strand of the target gene. In some embodiments, the contacted ngRNA directs the PE to introduce a nick in the target strand of the target gene. In some embodiments, the nick on the target strand (non-edit strand) results in endogenous DNA repair machinery to use the edit strand to repair the non-edit strand, thereby incorporating the intended nucleotide edit in both strand of the target gene and modifying the target gene. In some embodiments, the ngRNA comprises a spacer sequence that is complementary to, and may hybridize with, the second search target sequence on the edit strand only after the intended nucleotide edit(s) are incorporated in the edit strand of the target gene.

[0378] In some embodiments, the target gene is contacted by the ngRNA, the PEgRNA, and the PE simultaneously. In some embodiments, the ngRNA, the PEgRNA, and the PE form a complex when they contact the target gene. In some embodiments, the target gene is contacted with the ngRNA, the PEgRNA, and the prime editor sequentially. In some embodiments, the target gene is contacted with the ngRNA and/or the PEgRNA after contacting the target gene with the PE. In some embodiments, the target gene is contacted with the ngRNA and/or the PEgRNA before contacting the target gene with the prime editor.

[0379] In some embodiments, the target gene, is in a cell. Accordingly, also provided herein are methods of modifying a cell, such as a human cell, a human primary cell, and/or a human iPSC-derived cell.

[0380] In some embodiments, the prime editing method comprises introducing a PEgRNA, a prime editor, and/or a ngRNA into the cell that has the target gene. In some embodiments, the prime editing method comprises introducing into the cell that has the target gene with a prime editing composition comprising a PEgRNA, a prime editor polypeptide, and/or a ngRNA. In some embodiments, the PEgRNA, the prime editor polypeptide, and/or the ngRNA form a complex prior to the introduction into the cell. In some embodiments, the PEgRNA, the prime editor polypeptide, and/or the ngRNA form a complex after the introduction into the cell. The prime editors, PEgRNA and/or ngRNAs, and prime editing complexes may be introduced into the cell by any delivery approaches described herein or any delivery approach known in the art, including ribonucleoprotein (RNPs), lipid nanoparticles (LNPs), viral vectors, non-viral vectors, mRNA delivery, and physical techniques such as cell membrane disruption by a microfluidics device. The prime editors, PEgRNA and/or ngRNAs, and prime editing complexes may be introduced into the cell simultaneously or sequentially.

[0381] In some embodiments, the prime editing method comprises introducing into the cell a PEgRNA or a polynucleotide encoding the PEgRNA, a prime editor polynucleotide encoding a prime editor polypeptide, and optionally an ngRNA or a polynucleotide encoding the ngRNA. In some embodiments, the method comprises introducing the PEgRNA or the polynucleotide encoding the PEgRNA, the polynucleotide encoding the prime editor polypeptide, and/or the ngRNA or the polynucleotide encoding the ngRNA into the cell simultaneously. In some embodiments, the method comprises introducing the PEgRNA or the polynucleotide encoding the PEgRNA, the polynucleotide encoding the prime editor polypeptide, and/or the ngRNA or the polynucleotide encoding the ngRNA into the cell sequentially. In some embodiments, the method comprises introducing the polynucleotide encoding the prime editor polypeptide into the cell before introduction of the PEgRNA or the polynucleotide encoding the PEgRNA and/or the ngRNA or the polynucleotide encoding the ngRNA. In some embodiments, the polynucleotide encoding the prime editor polypeptide is introduced into and expressed in the cell before introduction of the PEgRNA or the polynucleotide encoding the PEgRNA and/or the ngRNA or the polynucleotide encoding the ngRNA into the cell. In some embodiments, the polynucleotide encoding the prime editor polypeptide is introduced into the cell after the PEgRNA or the polynucleotide encoding the PEgRNA and/or the ngRNA or the polynucleotide encoding the ngRNA are introduced into the cell. The polynucleotide encoding the prime editor polypeptide, the PEgRNA or the polynucleotide encoding the PEgRNA, and/or the ngRNA or the polynucleotide encoding the ngRNA, may be introduced into the cell by any delivery approaches described herein or any delivery approach known in the art, for example, by RNPs, LNPs, viral vectors, non-viral vectors, mRNA delivery, and physical delivery.

[0382] In some embodiments, the polynucleotide encoding the prime editor polypeptide, the polynucleotide encoding the PEgRNA, and/or the polynucleotide encoding the ngRNA integrate into the genome of the cell after being introduced into the cell. In some embodiments, the polynucleotide encoding the prime editor polypeptide, the polynucleotide encoding the PEgRNA, and/or the polynucleotide encoding the ngRNA are introduced into the cell for transient expression. Accordingly, also provided herein are cells modified by prime editing.

[0383] In some embodiments, the cell is a prokaryotic cell. In some embodiments, the cell is a eukaryotic cell. In some embodiments, the cell is a mammalian cell. In some embodiments, the cell is a non-human primate cell, bovine cell, porcine cell, rodent or mouse cell. In some embodiments, the cell is a human cell. In some embodiments, the cell is a primary cell. In some embodiments, the cell is a human primary cell. In some embodiments, the cell is a progenitor cell. In some embodiments, the cell is a human progenitor cell. In some embodiments, the cell is a human cell from an organ. In some embodiments, the cell is a primary human cell de

[0384] In some embodiments, the cell is a progenitor cell. In some embodiments, the cell is a stem cell. in some embodiments, the cell is an induced pluripotent stem cell. In some embodiments, the cell is an embryonic stem cell. In some embodiments, the cell is a retinal progenitor cell. In some embodiments, the cell is a retina precursor cell. In some embodiments, the cell is a fibroblast.

[0385] In some embodiments, the cell is a human stem cell. in some embodiments, the cell is an induced human pluripotent stem cell. In some embodiments, the cell is a human embryonic stem cell. In some embodiments, the cell is a human retinal progenitor cell. In some embodiments, the cell is a human retina precursor cell. In some embodiments, the cell is a human fibroblast.

[0386] In some embodiments, the cell is a primary cell. In some embodiments, the cell is a human primary cell. In some embodiments, the cell is a retina cell. In some embodiments, the cell is a photoreceptor. In some embodiments, the cell is a rod cell. In some embodiments, the cell is a cone cell. In some embodiments, the cell is a human cell from a retina. In some embodiments, the cell is a human photoreceptor. In some embodiments, the cell is a human rod cell. In some embodiments, the cell is a human cone cell. In some embodiments, the cell is a primary human photoreceptor derived from an induced human pluripotent stem cell (iPSC).

[0387] In some embodiments, the target gene edited by prime editing is in a chromosome of the cell. In some embodiments, the intended nucleotide edits incorporate in the chromosome of the cell and are inheritable by progeny cells. In some embodiments, the intended nucleotide edits introduced to the cell by the prime editing compositions and methods are such that the cell and progeny of the cell also include the intended nucleotide edits. In some embodiments, the cell is autologous, allogeneic, or xenogeneic to a subject. In some embodiments, the cell is from or derived from a subject. In some embodiments, the cell is from or derived from a human subject. In some embodiments, the cell is introduced back into the subject, e.g., a human subject, after incorporation of the intended nucleotide edits by prime editing.

[0388] In some embodiments, the method provided herein comprises introducing the prime editor polypeptide or the polynucleotide encoding the prime editor polypeptide, the PEgRNA or the polynucleotide encoding the PEgRNA, and/or the ngRNA or the polynucleotide encoding the ngRNA into a plurality or a population of cells that comprise the target gene. In some embodiments, the population of cells is of the same cell type. In some embodiments, the population of cells is of the same tissue or organ. In some embodiments, the population of cells is heterogeneous. In some embodiments, the population of cells is homogeneous. In some embodiments, the population of cells is from a single tissue or organ, and the cells are heterogeneous. In some embodiments, the introduction into the population of cells is ex vivo. In some embodiments, the introduction into the population of cells is in vivo, e.g., into a human subject.

[0389] In some embodiments, the target gene is in a genome of each cell of the population. In some embodiments, introduction of the prime editor polypeptide or the polynucleotide encoding the prime editor polypeptide, the PEgRNA or the polynucleotide encoding the PEgRNA, and/or the ngRNA or the polynucleotide encoding the ngRNA results in incorporation of one or more intended nucleotide edits in the target gene in at least one of the cells in the population of cells. In some embodiments, introduction of the prime editor polypeptide or the polynucleotide encoding the prime editor polypeptide, the PEgRNA or the polynucleotide encoding the PEgRNA, and/or the ngRNA or the polynucleotide encoding the ngRNA results in incorporation of the one or more intended nucleotide edits in the target gene in a plurality of the population of cells. In some embodiments, introduction of the prime editor polypeptide or the polynucleotide encoding the prime editor polypeptide, the PEgRNA or the polynucleotide encoding the PEgRNA, and/or the ngRNA or the polynucleotide encoding the ngRNA results in incorporation of the one or more intended nucleotide edits in the target gene in each cell of the population of cells. In some embodiments, introduction of the prime editor polypeptide or the polynucleotide encoding the prime editor polypeptide, the PEgRNA or the polynucleotide encoding the PEgRNA, and/or the ngRNA or the polynucleotide encoding the ngRNA results in incorporation of the one or more intended nucleotide edits in the target gene in sufficient number of cells such that the disease or disorder is treated, prevented or ameliorated.

[0390] In some embodiments, editing efficiency of the prime editing compositions and method described herein can be measured by calculating the percentage of edited target genes in a population of cells introduced with the prime editing composition. In some embodiments, the editing efficiency is determined after 1 hour, 2 hours, 6 hours, 12 hours, 24 hours, 36 hours, 48 hours. 3 days, 4 days, 5 days, 7 days. 10 days, or 14 days of exposing a target gene within the genome of a cell) to a prime editing composition. In some embodiments, the population of cells introduced with the prime editing composition is ex vivo. In some embodiments, the population of cells introduced with the prime editing composition is in vitro. In some embodiments, the population of cells introduced with the prime editing composition is in vivo. In some embodiments, the prime editing methods disclosed herein have an editing efficiency of at least about 1%, at least about 5%, at least about 10%, at least about 20%, at least about 30%, at least about 40%, at least about 50%, at least about 60%, at least about 70%, at least about 80%, at least about 90%, at least about 95%, or at least about 99% relative to a suitable control. In some embodiments, the prime editing methods disclosed herein have an editing efficiency of at least 25% relative to a suitable control. In some embodiments, the prime editing methods disclosed herein have an editing efficiency of at least 35% relative to a suitable control. In some embodiments, a prime editing method disclosed herein has an editing efficiency of at least 30% relative to a suitable control. In some embodiments, the prime editing methods disclosed herein have an editing efficiency of at least 45% relative to a suitable control. In some embodiments, the prime editing methods disclosed herein have an editing efficiency of at least 50% relative to a suitable control.

[0391] In some embodiments, the methods disclosed herein have an editing efficiency of at least about 1%, at least about 5%, at least about 7.5%, at least about 10%, at least about 15%, at least about 20%, at least about 30%, at least about 40%, at least about 50%, at least about 60%, at least about 70%, at least about 80%, at least about 90%, or at least about 95% of editing a primary cell relative to a suitable control.

[0392] In some embodiments, the methods disclosed herein have an editing efficiency of at least about 5%, at least about 7.5%, at least about 10%, at least about 15%, at least about 20%, at least about 30%, at least about 40%, at least about 50%, at least about 60%, at least about 70%, at least about 80%, at least about 90%, or at least about 95% of editing a hepatocyte relative to a corresponding control hepatocyte. In some embodiments, the hepatocyte is a human hepatocyte.

[0393] In some embodiments, the prime editing compositions provided herein are capable of incorporated one or more intended nucleotide edits without generating a significant proportion of indels. The term “indel(s)”, as used herein, refers to the insertion or deletion of a nucleotide base within a polynucleotide, for example, a target gene. Such insertions or deletions can lead to frame shift mutations within a coding region of a gene. Indel frequency of editing can be calculated by methods known in the art. In some embodiments, indel frequency can be calculated based on sequence alignment such as the CRISPResso 2 algorithm as described in Clement et al., Nat. Biotechnol. 37 (3): 224-226 (2019), which is incorporated herein in its entirety. In some embodiments, the methods disclosed herein can have an indel frequency of less than 20%, less than 10%, less than 9%, less than 8%, less than 7%, less than 6%, less than 5%, less than 4%, less than 3%, less than 2%, less than 1.5%, or less than 1%. In some embodiments, any number of indels is determined after at least 1 hour, at least 2 hours, at least 6 hours, at least 12 hours, at least 24 hours, at least 36 hours, at least 48 hours, at least 3 days, at least 4 days, at least 5 days, at least 7 days, at least 10 days, or at least 14 days of exposing a target gene (e.g., a gene within the genome of a cell) to a prime editing composition.

[0394] In some embodiments, the prime editing compositions provided herein are capable of incorporated one or more intended nucleotide edits efficiently without generating a significant proportion of indels. In some embodiments, the prime editing methods disclosed herein have an editing efficiency of at least about 1% and an indel frequency of less than 1% in a target cell, e.g., a human primary cell, human iPSC, or human fibroblast. In some embodiments, the prime editing methods disclosed herein have an editing efficiency of at least about 1% and an indel frequency of less than 0.5% in a target cell, e.g., a human primary cell, human iPSC, or human fibroblast. In some embodiments, the prime editing methods disclosed herein have an editing efficiency of at least about 1% and an indel frequency of less than 0.1% in a target cell, e.g., a human primary cell, a human iPSC, or a human fibroblast. In some embodiments, the prime editing methods disclosed herein have an editing efficiency of at least about 5% and an indel frequency of less than 1% in a target cell, e.g., a human primary cell, a human iPSC, or a human fibroblast. In some embodiments, the prime editing methods disclosed herein have an editing efficiency of at least about 5% and an indel frequency of less than 0.5% in a target cell, e.g., a human primary cell, a human iPSC, or a human fibroblast. In some embodiments, the prime editing methods disclosed herein have an editing efficiency of at least about 5% and an indel frequency of less than 0.1% in a target cell, e.g., a human primary cell, a human iPSC, or a human fibroblast.

[0395] In some embodiments, the prime editing methods disclosed herein have an editing efficiency of at least about 7.5% and an indel frequency of less than 1% in a target cell, e.g., a human primary cell, a human iPSC, or a human fibroblast. In some embodiments, the prime editing methods disclosed herein have an editing efficiency of at least about 7.5% and an indel frequency of less than 0.5% in a target cell, e.g., a human primary cell, a human iPSC, or a human fibroblast. In some embodiments, the prime editing methods disclosed herein have an editing efficiency of at least about 7.5% and an indel frequency of less than 0.1% in a target cell, e.g., a human primary cell, a human iPSC, or a human fibroblast.

[0396] In some embodiments, the prime editing methods disclosed herein have an editing efficiency of at least about 10% and an indel frequency of less than 1% in a target cell, e.g., a human primary cell, a human iPSC, or a human fibroblast. In some embodiments, the prime editing methods disclosed herein have an editing efficiency of at least about 10% and an indel frequency of less than 0.5% in a target cell, e.g., a human primary cell, a human iPSC, or a human fibroblast. In some embodiments, the prime editing methods disclosed herein have an editing efficiency of at least about 10% and an indel frequency of less than 0.1% in a target cell, e.g., a human primary cell, a human iPSC, or a human fibroblast.

[0397] In some embodiments, the prime editing methods disclosed herein have an editing efficiency of at least about 15% and an indel frequency of less than 1% in a target cell, e.g., a human primary cell, a human iPSC, or a human fibroblast. In some embodiments, the prime editing methods disclosed herein have an editing efficiency of at least about 15% and an indel frequency of less than 0.5% in a target cell, e.g., a human primary cell, a human iPSC, or a human fibroblast. In some embodiments, the prime editing methods disclosed herein have an editing efficiency of at least about 15% and an indel frequency of less than 0.1% in a target cell, e.g., a human primary cell, a human iPSC, or a human fibroblast.

[0398] In some embodiments, the prime editing methods disclosed herein have an editing efficiency of at least about 20% and an indel frequency of less than 1% in a target cell, e.g., a human primary cell, a human iPSC, or a human fibroblast. In some embodiments, the prime editing methods disclosed herein have an editing efficiency of at least about 20% and an indel frequency of less than 0.5% in a target cell, e.g., a human primary cell, a human iPSC, or a human fibroblast. In some embodiments, the prime editing methods disclosed herein have an editing efficiency of at least about 20% and an indel frequency of less than 0.1% in a target cell, e.g., a human primary cell, a human iPSC, or a human fibroblast.

[0399] In some embodiments, the prime editing methods disclosed herein have an editing efficiency of at least about 30% and an indel frequency of less than 1% in a target cell, e.g., a human primary cell, a human iPSC, or a human fibroblast. In some embodiments, the prime editing methods disclosed herein have an editing efficiency of at least about 30% and an indel frequency of less than 0.5% in a target cell, e.g., a human primary cell, a human iPSC, or a human fibroblast. In some embodiments, the prime editing methods disclosed herein have an editing efficiency of at least about 30% and an indel frequency of less than 0.1% in a target cell, e.g., a human primary cell, a human iPSC, or a human fibroblast.

[0400] In some embodiments, the prime editing methods disclosed herein have an editing efficiency of at least about 40% and an indel frequency of less than 1% in a target cell, e.g., a human primary cell, a human iPSC, or a human fibroblast. In some embodiments, the prime editing methods disclosed herein have an editing efficiency of at least about 40% and an indel frequency of less than 0.5% in a target cell, e.g., a human primary cell, a human iPSC, or a human fibroblast. In some embodiments, the prime editing methods disclosed herein have an editing efficiency of at least about 40% and an indel frequency of less than 0.1% in a target cell, e.g., a human primary cell, a human iPSC, or a human fibroblast.

[0401] In some embodiments, the prime editing methods disclosed herein have an editing efficiency of at least about 50% and an indel frequency of less than 1% in a target cell, e.g., a human primary cell, a human iPSC, or a human fibroblast. In some embodiments, the prime editing methods disclosed herein have an editing efficiency of at least about 50% and an indel frequency of less than 0.5% in a target cell, e.g., a human primary cell, a human iPSC, or a human fibroblast. In some embodiments, the prime editing methods disclosed herein have an editing efficiency of at least about 50% and an indel frequency of less than 0.1% in a target cell, e.g., a human primary cell, a human iPSC, or a human fibroblast.

[0402] In some embodiments, the prime editing methods disclosed herein have an editing efficiency of at least about 60% and an indel frequency of less than 1% in a target cell, e.g., a human primary cell, a human iPSC, or a human fibroblast. In some embodiments, the prime editing methods disclosed herein have an editing efficiency of at least about 60% and an indel frequency of less than 0.5% in a target cell, e.g., a human primary cell, a human iPSC, or a human fibroblast. In some embodiments, the prime editing methods disclosed herein have an editing efficiency of at least about 60% and an indel frequency of less than 0.1% in a target cell, e.g., a human primary cell, a human iPSC, or a human fibroblast.

[0403] In some embodiments, the prime editing methods disclosed herein have an editing efficiency of at least about 70% and an indel frequency of less than 1% in a target cell, e.g., a human primary cell, a human iPSC, or a human fibroblast. In some embodiments, the prime editing methods disclosed herein have an editing efficiency of at least about 70% and an indel frequency of less than 0.5% in a target cell, e.g., a human primary cell, a human iPSC, or a human fibroblast. In some embodiments, the prime editing methods disclosed herein have an editing efficiency of at least about 70% and an indel frequency of less than 0.1% in a target cell, e.g., a human primary cell, a human iPSC, or a human fibroblast.

[0404] In some embodiments, the prime editing methods disclosed herein have an editing efficiency of at least about 80% and an indel frequency of less than 1% in a target cell, e.g., a human primary cell, a human iPSC, or a human fibroblast. In some embodiments, the prime editing methods disclosed herein have an editing efficiency of at least about 80% and an indel frequency of less than 0.5% in a target cell, e.g., a human primary cell, a human iPSC, or a human fibroblast. In some embodiments, the prime editing methods disclosed herein have an editing efficiency of at least about 80% and an indel frequency of less than 0.1% in a target cell, e.g., a human primary cell, a human iPSC, or a human fibroblast.

[0405] In some embodiments, the prime editing methods disclosed herein have an editing efficiency of at least about 90% and an indel frequency of less than 1% in a target cell, e.g., a human primary cell, a human iPSC, or a human fibroblast. In some embodiments, the prime editing methods disclosed herein have an editing efficiency of at least about 90% and an indel frequency of less than 0.5% in a target cell, e.g., a human primary cell, a human iPSC, or a human fibroblast. In some embodiments, the prime editing methods disclosed herein have an editing efficiency of at least about 90% and an indel frequency of less than 0.1% in a target cell, e.g., a human primary cell, a human iPSC, or a human fibroblast.

[0406] In some embodiments, the prime editing methods disclosed herein have an editing efficiency of at least about 95% and an indel frequency of less than 1% in a target cell, e.g., a human primary cell, a human iPSC, or a human fibroblast. In some embodiments, the prime editing methods disclosed herein have an editing efficiency of at least about 95% and an indel frequency of less than 0.5% in a target cell, e.g., a human primary cell, a human iPSC, or a human fibroblast. In some embodiments, the prime editing methods disclosed herein have an editing efficiency of at least about 95% and an indel frequency of less than 0.1% in a target cell, e.g., a human primary cell, a human iPSC, or a human fibroblast. In some embodiments, any number of indels is determined after at least 1 hour, at least 2 hours, at least 6 hours, at least 12 hours, at least 24 hours, at least 36 hours, at least 48 hours, at least 3 days, at least 4 days, at least 5 days, at least 7 days, at least 10 days, or at least 14 days of exposing a target gene (e.g., a gene within the genome of a cell) to a prime editing composition. In some embodiments, the editing efficiency is determined after 1 hour, 2 hours, 6 hours, 12 hours, 24 hours, 36 hours, 48 hours, 3 days, 4 days, 5 days, 7 days, 10 days, or 14 days of exposing a target gene (e.g., a gene within the genome of a cell) to a prime editing composition.

[0407] In some embodiments, the prime editing composition described herein result in less than 50%, less than 40%, less than 30%, less than 20%, less than 19%, less than 18%, less than 17%, less than 16%, less than 15%, less than 14%, less than 13%, less than 12%, less than 11%, less than 10%, less than 9%, less than 8%, less than 7%, less than 6%, less than 5%, less than 4%, less than 3%, less than 2%, less than 1%, less than 0.9%, less than 0.8%, less than 0.7%, less than 0.6%, less than 0.5%, less than 0.4%, less than 0.3%, less than 0.2%, less than 0.1%, less than 0.09%, less than 0.08%, less than 0.07%, less than 0.06%, less than 0.05%, less than 0.04%, less than 0.03%, less than 0.02%, or less than 0.01% off-target editing in a chromosome that includes the target gene. In some embodiments, off-target editing is determined after at least 1 hour, at least 2 hours, at least 6 hours, at least 12 hours, at least 24 hours, at least 36 hours, at least 48 hours, at least 3 days, at least 4 days, at least 5 days, at least 7 days, at least 10 days, or at least 14 days of exposing a target gene (e.g., a nucleic acid within the genome of a cell) to a prime editing composition.

[0408] In some embodiments, the prime editing compositions (e.g., PEgRNAs and prime editors as described herein) and prime editing methods disclosed herein can be used to edit a target gene. In some embodiments, the target gene comprises a mutation compared to a wild type gene. In some embodiments, the mutation is associated a disease. In some embodiments, the target gene comprises an editing target sequence that contains the mutation associated with a disease. In some embodiments, the mutation is in a coding region of the target gene. In some embodiments, the mutation is in an exon of the target gene. In some embodiments, the prime editing method comprises contacting a target gene with a prime editing composition comprising a prime editor, a PEgRNA, and/or a ngRNA. In some embodiments, contacting the target gene with the prime editing composition results in incorporation of one or more intended nucleotide edits in the target gene. In some embodiments, the incorporation is in a region of the target gene that corresponds to an editing target sequence in the gene. In some embodiments, the one or more intended nucleotide edits comprises a single nucleotide substitution, an insertion, a deletion, or any combination thereof, compared to the endogenous sequence of the target gene. In some embodiments, incorporation of the one or more intended nucleotide edits results in replacement of one or more mutations with the corresponding sequence that encodes a wild type protein. In some embodiments, incorporation of the one or more intended nucleotide edits results in replacement of the one or more mutations with the corresponding sequence in a wild type gene. In some embodiments, incorporation of the one more intended nucleotide edits results in correction of a mutation in the target gene. In some embodiments, the target gene comprises an editing template sequence that contains the mutation. In some embodiments, contacting the target gene with the prime editing composition results in incorporation of one or more intended nucleotide edits in the target gene, which corrects the mutation in the editing target sequence (or a double stranded region comprising the editing target sequence and the complementary sequence to the editing target sequence on a target strand) in the target gene.

[0409] In some embodiments, incorporation of the one more intended nucleotide edits results in correction of a mutation in the target gene. In some embodiments, incorporation of the one more intended nucleotide edits results in correction of a gene sequence and restores wild type expression and function of the protein.

[0410] In some embodiments, the target gene is in a target cell. Accordingly, in one aspect provided herein is a method of editing a target cell comprising a target gene that encodes a polypeptide that comprises one or more mutations relative to a wild type gene. In some embodiments, the methods of the present disclosure comprise introducing a prime editing composition comprising a PEgRNA, a prime editor polypeptide, and/or a ngRNA into the target cell that has the target gene to edit the target gene, thereby generating an edited cell. In some embodiments, the target cell is a mammalian cell. In some embodiments, the target cell is a human cell. In some embodiments, the target cell is a primary cell. In some embodiments, the target cell is a human primary cell. In some embodiments, the target cell is a progenitor cell. In some embodiments, the target cell is a human progenitor cell. In some embodiments, the target cell is a stem cell. In some embodiments, the target cell is a human stem cell. In some embodiments, the target cell is a hepatocyte. In some embodiments, the target cell is a human hepatocyte. In some embodiments, the target cell is a primary human hepatocyte derived from an induced human pluripotent stem cell (iPSC). In some embodiments, the cell is a neuron. In some embodiments, the cell is a neuron from basal ganglia. In some embodiments, the cell is a neuron from basal ganglia of a subject. In some embodiments, the cell is a neuron in the basal ganglia of a subject.

[0411] In some embodiments, components of a prime editing composition described herein are provided to a target cell in vitro. In some embodiments, components of a prime editing composition described herein are provided to a target cell ex vivo. In some embodiments, components of a prime editing composition described herein are provided to a target cell in vivo.

[0412] In some embodiments, incorporation of the one or more intended nucleotide edits in the target gene that comprises one or more mutations restores wild type expression and function of protein encoded by the gene. In some embodiments, the target gene encodes at least one mutation as compared to the wild type protein prior to incorporation of the one or more intended nucleotide edits. In some embodiments, expression and/or function of protein may be measured when expressed in a target cell. In some embodiments, incorporation of the one or more intended nucleotide edits in the target gene comprising one or more mutations lead to a fold change in a level of gene expression, protein expression, or a combination thereof. In some embodiments, a change in the level of gene expression can comprise a fold change of, e.g., 2-fold, 3-fold. 4-fold, 5-fold, 6-fold, 7-fold, 8-fold, 9-fold, 10-fold, 15-fold, 20-fold, 25-fold, 30-fold, 40-fold, 50-fold, 60-fold, 70-fold, 80-fold, 90-fold, 100-fold or greater as compared to expression in a suitable control cell not introduced with a prime editing composition described herein. In some embodiments, incorporation of the one or more intended nucleotide edits in the target gene that comprises one or more mutations restores wild type expression of protein by at least 10%, 20%, 30%, 40%, 50%, 60%, 70%, 80%, 90%, 95%, 099% or more as compared to wild type expression of the protein in a suitable control cell that comprises a wild type gene.

[0413] In some embodiments, an expression increase can be measured by a functional assay. In some embodiments, protein expression can be measured using a protein assay. In some embodiments, protein expression can be measured using antibody testing. In some embodiments, protein expression can be measured using ELISA, mass spectrometry, Western blot, sodium dodecyl sulfate polyacrylamide gel electrophoresis (SDS-PAGE), high performance liquid chromatography (HPLC), electrophoresis, or any combination thereof. In some embodiments, a protein assay can comprise SDS-PAGE and densitometric analysis of a Coomassie Blue-stained gel.

### Delivery

[0414] Prime editing compositions described herein can be delivered to a cellular environment with any approach known in the art. Components of a prime editing composition can be delivered to a cell by the same mode or different modes. For example, in some embodiments, a prime editor can be delivered as a polypeptide or a polynucleotide (DNA or RNA) encoding the polypeptide. In some embodiments, a PEgRNA can be delivered directly as an RNA or as a DNA encoding the PEgRNA.

[0415] In some embodiments, a prime editing composition component is encoded by a polynucleotide, a vector, or a construct. In some embodiments, a prime editor polypeptide, a PEgRNA and/or a ngRNA is encoded by a polynucleotide. In some embodiments, the polynucleotide encodes a prime editor fusion protein comprising a DNA binding domain and a DNA polymerase domain. In some embodiments, the polynucleotide encodes a DNA polymerase domain of a prime editor. In some embodiments, the polynucleotide encodes a DNA polymerase domain of a prime editor. In some embodiments, the polynucleotide encodes a portion of a prime editor protein, for example, a N-terminal portion of a prime editor fusion protein connected to an intein-N. In some embodiments, the polynucleotide encodes a portion of a prime editor protein, for example, a C-terminal portion of a prime editor fusion protein connected to an intein-C. In some embodiments, the polynucleotide encodes a PEgRNA and/or a ngRNA. In some embodiments, the polypeptide encodes two or more components of a prime editing composition, for example, a prime editor fusion protein and a PEgRNA.

[0416] In some embodiments, the polynucleotide encoding one or more prime editing composition components is delivered to a target cell is integrated into the genome of the cell for long-term expression, for example, by a retroviral vector. In some embodiments, the polynucleotide delivered to a target cell is expressed transiently. For example, the polynucleotide may be delivered in the form of a mRNA, or a non-integrating vector (non-integrating virus, plasmids, minicircle DNAs) for episomal expression.

[0417] In some embodiments, a polynucleotide encoding one or more prime editing system components can be operably linked to a regulatory element, e.g., a transcriptional control element, such as a promoter. In some embodiments, the polynucleotide is operably linked to multiple control elements. Depending on the expression system utilized, any of a number of suitable transcription and translation control elements, including constitutive and inducible promoters, transcription enhancer elements, transcription terminators, etc. may be used in the expression vector (e.g., U6 promoter, H1 promoter).

[0418] In some embodiments, the polynucleotide encoding one or more prime editing composition components is a part of, or is encoded by, a vector. In some embodiments, the vector is a viral vector. In some embodiments, the vector is a non-viral vector.

[0419] Non-viral vector delivery systems can include DNA plasmids, RNA (e.g., a transcript of a vector described herein), naked nucleic acid, and nucleic acid complexed with a delivery vehicle, such as a liposome. In some embodiments, the polynucleotide is provided as an RNA, e.g., a mRNA or a transcript. Any RNA of the prime editing systems, for example a guide RNA or a base editor-encoding mRNA, can be delivered in the form of RNA. In some embodiments, one or more components of the prime editing system that are RNAs is produced by direct chemical synthesis or may be transcribed in vitro from a DNA. In some embodiments, a mRNA that encodes a prime editor polypeptide is generated using in vitro transcription. Guide polynucleotides (e.g., PEgRNA or ngRNA) can also be transcribed using in vitro transcription from a cassette containing a T7 promoter, followed by the sequence “GG”, and guide polynucleotide sequence. In some embodiments, the prime editor encoding mRNA, PEgRNA, and/or ngRNA are synthesized in vitro using an RNA polymerase enzyme (e.g., T7 polymerase, T3 polymerase, SP6 polymerase, etc.). Once synthesized, the RNA can directly contact a target gene or can be introduced into a cell using any suitable technique for introducing nucleic acids into cells (e.g., microinjection, electroporation, transfection). In some embodiments, the prime editor-coding sequences, the PEgRNAs, and/or the ngRNAs are modified to include one or more modified nucleoside e.g., using pseudo-U or 5-Methyl-C.

[0420] Methods of non-viral delivery of nucleic acids can include lipofection, nucleofection, microinjection, biolistics, virosomes, liposomes, immunoliposomes, polycation or lipid:nucleic acid conjugates, naked DNA, artificial virions, cell membrane disruption by a microfluidics device, and agent-enhanced uptake of DNA. Cationic and neutral lipids that are suitable for efficient receptor-recognition lipofection of polynucleotides can be used. Delivery can be to cells (e.g., in vitro or ex vivo administration) or target tissues (e.g., in vivo administration). The preparation of lipid:nucleic acid complexes, including targeted liposomes such as immunolipid complexes, can be used.

[0421] Viral vector delivery systems can include DNA and RNA viruses, which can have either episomal or integrated genomes after delivery to the cell. RNA or DNA viral based systems can be used to target specific cells and trafficking the viral payload to an organelle of the cell. Viral vectors can be administered directly (in vivo) or they can be used to treat cells in vitro, and the modified cells can optionally be administered (ex vivo).

[0422] In some embodiments, the viral vector is a retroviral, lentiviral, adenoviral, adeno-associated viral or herpes simplex viral vector. Retroviral vectors can include those based upon murine leukemia virus (MuLV), gibbon ape leukemia virus (GaLV), simian immunodeficiency virus (SIV), human immunodeficiency virus (HIV), and combinations thereof. In some embodiments, the retroviral vector is a lentiviral vector. In some embodiments, the retroviral vector is a gamma retroviral vector. In some embodiments, the viral vector is an adenoviral vector. In some embodiments, the viral vector is an adeno-associated virus (“AAV”) vector.

[0423] In some embodiments, polynucleotides encoding one or more prime editing composition components are packaged in a virus particle. Packaging cells can be used to form virus particles that can infect a target cell. Such cells can include 293 cells, (e.g., for packaging adenovirus), and ψ2 cells or PA317 cells (e.g., for packaging retrovirus). Viral vectors can be generated by producing a cell line that packages a nucleic acid vector into a viral particle. The vectors can contain the minimal viral sequences required for packaging and subsequent integration into a host. The vectors can contain other viral sequences being replaced by an expression cassette for the polynucleotide(s) to be expressed. The missing viral functions can be supplied in trans by the packaging cell line. For example, AAV vectors can comprise ITR sequences from the AAV genome which are required for packaging and integration into the host genome.

[0424] In some embodiments, dual AAV vectors are generated by splitting a large transgene expression cassette in two separate halves (5′ and 3′ ends that encode N-terminal portion and C-terminal portion of, e.g., a prime editor polypeptide), where each half of the cassette is no more than 5 kb in length, optionally no more than 4.7 kb in length, and is packaged in a single AAV vector. In some embodiments, the full-length transgene expression cassette is reassembled upon co-infection of the same cell by both dual AAV vectors. In some embodiments, a portion or fragment of a prime editor polypeptide, e.g., a Cas9 nickase, is fused to an intein. The portion or fragment of the polypeptide can be fused to the N-terminus or the C-terminus of the intein. In some embodiments, a N-terminal portion of the polypeptide is fused to an intein-N, and a C-terminal portion of the polypeptide is separately fused to an intein-C. In some embodiments, a portion or fragment of a prime editor fusion protein is fused to an intein and fused to an AAV capsid protein. The intein, nuclease and capsid protein can be fused together in any arrangement (e.g., nuclease-intein-capsid, intein-nuclease-capsid, capsid-intein-nuclease, etc.). In some embodiments, a polynucleotide encoding a prime editor fusion protein is split in two separate halves, each encoding a portion of the prime editor fusion protein and separately fused to an intein. In some embodiments, each of the two halves of the polynucleotide is packaged in an individual AAV vector of a dual AAV vector system. In some embodiments, each of the two halves of the polynucleotide is no more than 5 kb in length, optionally no more than 4.7 kb in length. In some embodiments, the full-length prime editor fusion protein is reassembled upon co-infection of the same cell by both dual AAV vectors, expression of both halves of the prime editor fusion protein, and self-excision of the inteins.

[0425] A target cell can be transiently or non-transiently transfected with one or more vectors described herein. A cell can be transfected as it naturally occurs in a subject. A cell can be taken or derived from a subject and transfected. A cell can be derived from cells taken from a subject, such as a cell line. In some embodiments, a cell transfected with one or more vectors described herein can be used to establish a new cell line comprising one or more vector-derived sequences. In some embodiments, a cell transiently transfected with the compositions of the disclosure (such as by transient transfection of one or more vectors, or transfection with RNA), and modified through the activity of a prime editor, can be used to establish a new cell line comprising cells containing the modification but lacking any other exogenous sequence. Any suitable vector compatible with the host cell can be used with the methods of the disclosure. Non-limiting examples of vectors include pXT1, pSG5, pSVK3, pBPV, pMSG, and pSVLSV40.

[0426] In some embodiments, a prime editor protein can be provided to cells as a polypeptide. In some embodiments, the prime editor protein is fused to a polypeptide domain that increases solubility of the protein. In some embodiments, the prime editor protein is formulated to improve solubility of the protein.

[0427] In some embodiment, a prime editor polypeptide is fused to a polypeptide permeant domain to promote uptake by the cell. In some embodiments, the permeant domain is a including peptide, a peptidomimetic, or a non-peptide carrier. For example, a permeant peptide may be derived from the third alpha helix of Drosophila melanogaster transcription factor Antennapaedia, referred to as penetratin, which comprises the amino acid sequence RQIKIWFQNRRMKWKK. As another example, the permeant peptide can comprise the HIV-1 that basic region amino acid sequence, which may include, for example, amino acids 49-57 of naturally-occurring that protein. Other permeant domains can include poly-arginine motifs, for example, the region of amino acids 34-56 of HIV-1 rev protein, nona-arginine, and octa-arginine. The nona-arginine (R9) sequence can be used. The site at which the fusion can be made may be selected in order to optimize the biological activity, secretion or binding characteristics of the polypeptide.

[0428] In some embodiments, a prime editor polypeptide is produced in vitro or by host cells, and it may be further processed by unfolding, e.g., heat denaturation, DTT reduction, etc. and may be further refolded. In some embodiments, a prime editor polypeptide is prepared by in vitro synthesis. Various commercial synthetic apparatuses can be used. By using synthesizers, naturally occurring amino acids can be substituted with unnatural amino acids. In some embodiments, a prime editor polypeptide is isolated and purified in accordance with recombinant synthesis methods, for example, by expression in a host cell and the lysate purified using HPLC, exclusion chromatography, gel electrophoresis, affinity chromatography, or other purification technique.

[0429] In some embodiments, a prime editing composition, for example, prime editor polypeptide components and PEgRNA/ngRNA are introduced to a target cell by nanoparticles. In some embodiments, the prime editor polypeptide components and the PEgRNA and/or ngRNA form a complex in the nanoparticle. Any suitable nanoparticle design can be used to deliver genome editing system components or nucleic acids encoding such components. In some embodiments, the nanoparticle is inorganic. In some embodiments, the nanoparticle is organic. In some embodiments, a prime editing composition is delivered to a target cell, e.g., a hepatocyte, in an organic nanoparticle, e.g., a lipid nanoparticle (LNP) or polymer nanoparticle.

[0430] In some embodiments, LNPs are formulated from cationic, anionic, neutral lipids, or combinations thereof. In some embodiments, neutral lipids, such as the fusogenic phospholipid DOPE or the membrane component cholesterol, are included to enhance transfection activity and nanoparticle stability. In some embodiments, LNPs are formulated with hydrophobic lipids, hydrophilic lipids, or combinations thereof. Lipids may be formulated in a wide range of molar ratios to produce an LNP. Any lipid or combination of lipids that are known in the art can be used to produce an LNP. Exemplary lipids used to produce LNPs are provided in Table 11 below.

[0431] In some embodiments, components of a prime editing composition form a complex prior to delivery to a target cell. For example, a prime editor fusion protein, a PEgRNA, and/or a ngRNA can form a complex prior to delivery to the target cell. In some embodiments, a prime editing polypeptide (e.g., a prime editor fusion protein) and a guide polynucleotide (e.g., a PEgRNA or ngRNA) form a ribonucleoprotein (RNP) for delivery to a target cell. In some embodiments, the RNP comprises a prime editor fusion protein in complex with a PEgRNA. RNPs may be delivered to cells using known methods, such as electroporation, nucleofection, or cationic lipid-mediated methods, or any other approaches known in the art. In some embodiments, delivery of a prime editing composition or complex to the target cell does not require the delivery of foreign DNA into the cell. In some embodiments, the RNP comprising the prime editing complex is degraded over time in the target cell. Exemplary lipids for use in nanoparticle formulations and/or gene transfer are shown in Table 11 below.

TABLE 11
Exemplary lipids for nanoparticle formulation or gene transfer

| Lipid | Abbreviation | Feature |
|---|---|---|
| 1,2-Dioleoyl-sn-glycero-3-phosphatidylcholine | DOPC | Helper |
| 1,2-Dioleoyl-sn-glycero-3-phosphatidylethanolamine | DOPE | Helper |
| Cholesterol | | Helper |
| N41-(2,3-Dioleyloxy)prophyliN,N,N-trimethylammonium | DOTMA | Cationic |
| chloride | | |
| 1,2-Dioleoyloxy-3-trimethylammonium-propane | DOGS | Cationic |
| Dioctadecylamidoglycylspermine | | |
| N-(3-Aminopropy1)-N,N-dimethy1-2,3-bis(dodecyloxy)-1- | GAP-DLRIE | Cationic |
| propanaminium bromide | | |
| Cetyltrimethylammonium bromide | CTAB | Cationic |
| 6-Lauroxyhexyl omithinate | LHON | Cationic |
| 1-(2,3-Dioleoyloxypropy1)-2,4,6-trimethylpyridinium | 2Oc | Cationic |
| 2,3-Dioleyloxy-N-P(spenninecarboxamido-ethy1J-N,Ndimethyl- | DOSPA | Cationic |
| 1-propanatninium trifluoroacetate | | |
| 1,2-Dioley1-3-trimethylamtnonium-propane | DOPA | Cationic |
| N-(2-Hydroxyethyl)-N,N-dimethy1-2,3-bis(tetradecyloxy)-1- | MDRIE | Cationic |
| propanaminium bromide | | |
| Dimyristooxypropyl dimethyl hydroxyethyl ammonium bromide | DMRI | Cationic |
| 3β-[N-(N′,N′-Dimethylaminoethane)-carbamoyl]cholesterol | DC-Chol | Cationic |
| Bis-guanidium-tren-cholesterol | BGTC | Cationic |
| 1,3-Diodeoxy-2-(6-carboxy-spermy1)-propylamide | DOSPER | Cationic |
| Dimethyloctadecylammonium bromide | DDAB | Cationic |
| Dioctadecylamidoglicylspermidin | DSL | Cationic |
| rac-[(2,3-Dioctadecyloxypropyl)(2-hydroxyethyl)]- | CLIP-1 | Cationic |
| dimethylammonium chloride | | |
| rac-[2(2,3-Dihexadecyloxypropyloxymethyloxy) | CLIP-6 | Cationic |
| ethyl]trimethylammoniun bromide | | |
| Ethyldimyristoylphosphatidylcholine | EDMPC | Cationic |
| 1,2-Distearyloxy-N,N-dimethyl-3-aminopropane | DSDMA | Cationic |
| 1,2-Dimyristoyl-trimethylammonium propane | DMTAP | Cationic |
| O,O′-Dimyristyl-N-lysyl aspartate | DMKE | Cationic |
| 1,2-Distearoyl-sn-glycero-3-ethylpho sphocholine | DSEPC | Cationic |
| N-Palmitoyl D-erythro-sphingosyl carbamoyl-spenmine | CCS | Cationic |
| N-t-Butyl-N0-tetradecyl-3-tetradecylaminopropionamidine | diC14- | Cationic |
| | amidine | |
| Octadecenolyoxy[ethyl-2-heptadecenyl-3 hydroxyethyl] | DOTIM | Cationic |
| imidazolinium chloride | | |
| N1-Cholesteryloxycarbonyl-3,7-diazanonane-1,9-diamine | CDAN | Cationic |
| 2-(3-Bis(3-amino-propy1)-amino]propylamino)- | RPR209120 | Cationic |
| Nditetradecylcarbamoylme-ethyl-acetamide | | |
| 1,2-dilinoleyloxy-3-dimethylaminopropane | DLinDMA | Cationic |
| 2,2-dilinoley1-4-dimethylaminoethyl-[1,3]-dioxolane | DLin-KC2- | Cationic |
| | DMA | |
| dilinoleyl-methyl-4-dimethylaminobutyrate | DLin-MC3- | Cationic |
| | DMA | |

[0432] Exemplary polymers for use in nanoparticle formulations and/or gene transfer are shown in Table 12 below.

TABLE 12
Exemplary lipids for nanoparticle formulation or gene transfer

| Polymer | Abbreviation |
|---|---|
| Poly(ethylene)glycol | PEG |
| Polyethylenimine | PEI |
| Dithiobis (succinimidylpropionate) | DSP |
| Dimethyl-3,3′-dithiobispropionimidate | DTBP |
| Poly(ethylene imine)biscarbamate | PEIC |
| Poly(L-lysine) | PLL |
| Histidine modified PLL | |
| Poly(N-vinylpyrrolidone) | PVP |
| Poly(propylenimine) | PPI |
| Poly(amidoamine) | PAMAM |
| Poly(amidoethylenimine) | SS_PAEI |
| Triethylenetetramine | TETA |
| Poly(β-aminoester) | |
| Poly(4-hydroxy-L-proline ester) | PHP |
| Poly(allylamine) | |
| Poly(α-[4-aminobutyl]-L-glycolic acid) | PAGA |
| Poly(D,L-lactic-co-glycolic acid) | PLGA |
| Poly(N-ethyl-4-vinylpyridinium bromide) | |
| Poly(phosphazene)s | PPZ |
| Poly(phosphoester)s | PPE |
| Poly(phosphoramidate)s | PPA |
| Poly(N-2-hydroxypropylmethacrylamide) | pHPMA |
| Poly (2-(dimethylamino)ethyl methacrylate) | pDMAEMA |
| Poly(2-aminoethyl propylene phosphate) | PPE-EA |
| Chitosan | |
| Galactosylated chitosan | |
| N-dodacylated chitosam | |
| Histone | |
| Collagen | |
| Dextran-spermine | D-SPM |

[0433] Exemplary delivery methods for polynucleotides encoding prime editing composition components are shown in Table 13 below.

TABLE 13
Exemplary polynucleotide delivery methods

| | | Delivery | | | |
|---|---|---|---|---|---|
| | | into Non- | | | Type of |
| | | Dividing | Duration of | Genome | Molecule |
| Delivery | Vector/Mode | Cells | Expression | Integration | Delivered |
| Physical | (e.g., | YES | Transient | NO | Nucleic |
| | electroporation, | | | | Acids and |
| | particle gun, | | | | Proteins |
| | Calcium phosphate | | | | |
| | transfection) | | | | |
| Viral | Retrovirus | NO | Stable | YES | RNA |
| | Lentivirus | YES | Stable | YES/NO with | RNA |
| | | | | modification | |
| | Adenovirus | YES | Transient | NO | DNA |
| | Adeno-Associated | YES | Stable | NO | DNA |
| | Virus (AAV) | | | | |
| | Vaccinia Virus | YES | Very | NO | DNA |
| | | | Transient | | |
| | Herpes Simplex | YES | Stable | NO | DNA |
| | Virus | | | | |
| Non-Viral | Cationic | YES | Transient | Depends on | Nucleic |
| | | | | what is | acids and |
| | | | | delivered | Proteins |
| | Polymeric | YES | Transient | NO | Nucleic |
| | Nanoparticles | | | | Acids |
| Biological | Attenuated | YES | Transient | NO | Nucleic |
| | Bacteria | | | | Acids |
| Non-Viral | Engineered | YES | Transient | NO | Nucleic |
| Delivery | Bacteriophages | | | | Acids |
| Vehicles | Mammalian | YES | Transient | NO | Nucleic |
| | Virus-like | | | | Acids |
| | Particles | | | | |
| | Biological | YES | Transient | NO | Nucleic |
| | liposomes: | | | | Acids |
| | Erythrocyte | | | | |
| | Ghosts and | | | | |
| | Exosomes | | | | |

[0434] The prime editing compositions of the disclosure, whether introduced as polynucleotides or polypeptides, can be provided to the cells for about 30 minutes to about 24 hours, e.g., 1 hour, 1.5 hours, 2 hours, 2.5 hours, 3 hours, 3.5 hours 4 hours, 5 hours, 6 hours, 7 hours, 8 hours, 12 hours, 16 hours, 18 hours, 20 hours, or any other period from about 30 minutes to about 24 hours, which can be repeated with a frequency of about every day to about every 4 days, e.g., every 1.5 days, every 2 days, every 3 days, or any other frequency from about every day to about every four days. The compositions may be provided to the subject cells one or more times, e.g., one time, twice, three times, or more than three times, and the cells allowed to incubate with the agent(s) for some amount of time following each contacting event e.g., 16-24 hours. In cases in which two or more different prime editing system components, e.g., two different polynucleotide constructs are provided to the cell (e.g., different components of the same prim editing system, or two different guide nucleic acids that are complementary to different sequences within the same or different target genes), the compositions may be delivered simultaneously (e.g., as two polypeptides and/or nucleic acids). Alternatively, they may be provided sequentially, e.g., one composition being provided first, followed by a second composition.

[0435] The prime editing compositions and pharmaceutical compositions of the disclosure, whether introduced as polynucleotides or polypeptides, can be administered to subjects in need thereof for about 30 minutes to about 24 hours, e.g., 1 hour, 1.5 hours, 2 hours, 2.5 hours, 3 hours, 3.5 hours 4 hours, 5 hours, 6 hours, 7 hours, 8 hours, 12 hours, 16 hours, 18 hours, 20 hours, or any other period from about 30 minutes to about 24 hours, which can be repeated with a frequency of about every day to about every 4 days, e.g., every 1.5 days, every 2 days, every 3 days, or any other frequency from about every day to about every four days. The compositions may be provided to the subject one or more times, e.g., one time, twice, three times, or more than three times. In cases in which two or more different prime editing system components, e.g., two different polynucleotide constructs are administered to the subject (e.g., different components of the same prim editing system, or two different guide nucleic acids that are complementary to different sequences within the same or different target genes), the compositions may be administered simultaneously (e.g., as two polypeptides and/or nucleic acids). Alternatively, they may be provided sequentially, e.g., one composition being provided first, followed by a second composition.

### EXAMPLES

### Example 1—Experimental Protocol of PEgRNA Screening Library

[0436] This experimental protocol of pegRNA screening library builds from the published method for screening PEgRNA variants in a pooled format using lentivirus libraries (Kim, H. K., Yu, G., Park, J. et al. Predicting the efficiency of prime editing guide RNAs in human cells. Nat Biotechnol (2020)).

[0437] The PEgRNAs described herein were tested with lentivirus constructed libraries. Lentiviral vectors were designed and constructed such that each lentiviral vector contains a sequence that encodes a single pegRNA and a corresponding target sequence. The lentiviral vectors were used to transduce HEK293T cells at a low MOI to allow for ˜ 1 virus integrant per infected cell. The cells were grown under antibiotic selection to enrich for cells containing the editing construct. After selection, the enriched cells are transfected with a plasmid encoding a prime editor fusion protein. 3 days after transfection, genomic DNA was harvested, and the target sequences were amplified and sequenced to examine editing efficiency.

[0438] The overall design of the oligonucleotide library is shown in FIG. 10.

[0439] The oligonucleotides contain, in a 5′ to 3′ order, homology to a U6 promoter, a pegRNA spacer sequence, either a partial scaffold fragment with internal BsmBI site or a full scaffold sequence (depending on the library design), a 7-nt polyT terminator, a 12-nt barcode 1, the DNA target site, a 12-nt barcode 2, and a 3′ primer binding site. By having the target site flanked by two barcodes, matched at the stage of synthesis, crossover of PCR during amplification from gDNA were identified and removed from sequence analysis.

[0440] The product of PCR amplification with AVA184 and AVA185 produces the construct in FIG. 11.

### The Oligo Library was Amplified Using the Following Primers:

Forward primer (AVA184):
(SEQ ID NO: 7054)
CGATTTCTTGGCTTTATATATCTTGTGGAAAGGACGAAAC
ACC
(SEQ ID NO: 7055)
TTATTACAGGGACAGCAGAGATCCAGTTTATCGATNNNNN
NATCGCGGTACGCCAAGCT

### Gibson Assembly:

[0441] Lentiviral vectors were constructed using Gibson assembly method as described below. An acceptor vector was digested with Esp3I or BsmBI. The linearized product was purified and used for Gibson assembly with a 1:1-1:7 molar ratio to the oligo library. Electrocompetent NEB stable cells were transformed. The next day, the bacteria cells were harvested, and DNA was extracted with Qiagen plasmid plus midiprep using manufacturer's standard protocol. Clones were sequenced with next generation sequencing to ensure that the library as designed is represented in the clones.

### Make Lentivirus:

[0442] Lentivirus was prepared with a 3-plasmid system: On day 0, HEK293T cells were plated in a T150 flask. On day 1, 18 μg of lenti transfer vector, 18 μg of psPAX2, 12 μg of pMD2.g, and opti-mem up to 1250 uL were mixed. A separate solution containing lipofectamine 2000 was freshly prepared. Then, the two solutions were mixed and incubated. After 48 hours of incubation (day 3), the supernatant media was collected. 5× peg solution was added to the lentivirus solution to a final concentration of 1×, the solution was mixed well, and the mixture was left at 4° C. overnight. The next day, the precipitated lentivirus) was pelleted and resuspended and stored at −80° C.

### Full Scale Tissue Culture Transduction, Transfection:

[0443] Cells were plated in a T150 flask on day −1. On day 0, infect cells were predetermined with virus concentration condition to achieve ˜30% survival after antibiotic selection. The cells were transfected on day 6. On days 8-13, cells were harvested and genomic DNA was extracted for NGS prep. Forward and reverse primers as provided below are used to determine the optimal gDNA concentration to use per PCR reaction. Unique barcoding primers were used to uniquely identify editing at each target sequence. Sequencing results were analyzed, after removing reads that 1) do not contain barcodes or 2) contain crossover events (i.e. mismatch between the barcodes and the spacer sequences), with CRISPRESSO as described in Clement, K. et al., Nat. Biotechnol. 37, 224-226 (2019).

TABLE 14

| Forward primer | sequence |
|---|---|
| dsw50 | ACACTCTTTCCCTACACGACGCTCTTCC |
| | GATCTNNCTTGTGGAAAGGACGAAACA |
| | CC (SEQ ID NO: 7056) |
| dsw51 | ACACTCTTTCCCTACACGACGCTCTTCC |
| | GATCTNNNCTTGTGGAAAGGACGAAAC |
| | ACC (SEQ ID NO: 7057) |
| dsw52 | ACACTCTTTCCCTACACGACGCTCTTCC |
| | GATCTNNNNCTTGTGGAAAGGACGAA |
| | ACACC (SEQ ID NO: 7058) |
| dsw53 | ACACTCTTTCCCTACACGACGCTCTTCC |
| | GATCTNNNNNCTTGTGGAAAGGACGA |
| | AACACC (SEQ ID NO: 7059) |

TABLE 15

| Reverse primer | sequence |
|---|---|
| dsw5 | TGGAGTTCAGACGTGTGCTCTTCCGAT |
| | CTNGGACAGCAGAGATCCAGTTTATCG |
| | AT (SEQ ID NO: 7060) |
| dsw6 | TGGAGTTCAGACGTGTGCTCTTCCGAT |
| | CTNNGGACAGCAGAGATCCAGTTTATC |
| | GAT (SEQ ID NO: 7061) |
| dsw7 | TGGAGTTCAGACGTGTGCTCTTCCGAT |
| | CTNNNGGACAGCAGAGATCCAGTTTAT |
| | CGAT (SEQ ID NO: 7062) |

### Example 2—Prime Editing of Human Gene Targets with Modified PEgRNA Sequences

[0444] To examine modifications in the gRNA core of PEgRNAs, PEgRNAs were designed for prime editing in seven target loci in six human genes (ATP7B, SLC37A4, EMX1, FANCF, HEK3, and NCF1) as indicated in Table 17 below. For ATP7B, SLC37A4, and NCF1, the mutations to be corrected by PEgRNA for each gene are also indicated. Each PEgRNA contained one or more nucleotide sequence modifications as indicated in Table 17. PEgRNAs and screening library were generated editing efficiency was determined as described in Example 1 above. For each PEgRNA, prime editing efficiency was normalized to a corresponding control PEgRNA having the same spacer, PBS, and editing template for the target locus and with a gRNA core as set forth in SEQ ID NO: 16. The normalized editing results are shown in Table 17, where each number indicates fold change in editing efficiency as compared to the control PEgRNA. Sequences of the modified gRNA core are provided in Table 1: for each modification indicated in the “Variant” column in Table 17, the variant name after “Scaffold” corresponds to the gRNA core name in Table 1. For example, variant “Scaffold_F+E” corresponds to gRNA core name “F+E” in Table 1. The “modification includes M4” column indicates whether the PEgRNA includes a M4 modification besides the modification indicated by the “variant” name, where “Scaffold_M4” only has the M4 modification and no other modifications.

TABLE 17
gRNA variant core results

| | gRNA core | | | SLC37A | | | | NCF1- | | average fold editing |
|---|---|---|---|---|---|---|---|---|---|---|
| gRNA core | SEQ ID | ATP7B- | ATP7B- | 4 | EMX1_{—} | FANCF_{—} | HEK3_{—} | c.73_74 | Modification | relative to canonical |
| name | No. | H1069Q | R778L | G339C | TGC | ACC | GC | delGT | includes M4 | SpCas9 gRNA core |
| F + E | 24 | 2.25 | 2.11 | 4.17 | 1.14 | 2.4 | 3.23 | 0.59 | Y | 2.27 |
| sl2_flip | 25 | 1.8 | 2.93 | 3.24 | 1.14 | 1.88 | 3.35 | 1.38 | Y | 2.25 |
| TetraLoop_L1 | 27 | 2.39 | 1.66 | 4.06 | 1.26 | 1.79 | 2.69 | 1.01 | Y | 2.12 |
| TetraLoop_L2 | 28 | 2.42 | 1.66 | 3.85 | 1.31 | 2.18 | 2.58 | 0.81 | Y | 2.12 |
| TetraLoop_L8 | 34 | 2.03 | 1.92 | 3.67 | 1.02 | 1.76 | 2.81 | 0.8 | Y | 2 |
| TetraLoop_L9 | 35 | 1.98 | 1.18 | 3.95 | 1.32 | 2.5 | 2.4 | 0.66 | Y | 2 |
| TetraLoop_L10 | 36 | 1.54 | 1.65 | 4.15 | 1.56 | 2.07 | 1.98 | 0.94 | Y | 1.98 |
| Loop2_L3 | 41 | 2.02 | 1.87 | 1.957 | 1.18 | 2.4 | 2.98 | 1.23 | Y | 1.96 |
| TetraLoop_L0 | 26 | 2.16 | 1.95 | 3.34 | 0.65 | 2.43 | 1.75 | 0.83 | Y | 1.87 |
| TetraLoop_L11 | 37 | 1.84 | 1.54 | 3.459 | 0.88 | 2.44 | 2.08 | 0.81 | Y | 1.86 |
| Loop2_L2 | 40 | 2 | 2.05 | 1.85 | 1.4 | 2.05 | 2.72 | 0.85 | Y | 1.85 |
| TetraLoop_L5 | 31 | 1.64 | 1.94 | 2.82 | 0.73 | 2.53 | 2.35 | 0.84 | Y | 1.84 |
| Loop2_L0 | 38 | 1.94 | 1.98 | 2.58 | 0.95 | 2.88 | 1.15 | 1.16 | Y | 1.81 |
| TetraLoop_L3 | 29 | 1.39 | 0.85 | 3.28 | 0.98 | 2.94 | 2.39 | 0.69 | Y | 1.79 |
| TetraLoop_L4 | 30 | 2.3 | 1.58 | 2.39 | 1.39 | 1.78 | 2.1 | 0.88 | Y | 1.78 |
| M4 | 20 | 1.75 | 1.29 | 2.62 | 1.58 | 1.93 | 2.5 | 0.74 | Y(M4 alone) | 1.77 |
| E5 | 23 | 1.42 | 1.45 | 1.81 | 0.74 | 2.61 | 2.47 | 1.65 | no | 1.74 |
| TetraLoop_L6 | 32 | 1.69 | 1.62 | 2.18 | 0.82 | 1.78 | 2.32 | 0.91 | Y | 1.62 |
| TetraLoop_L7 | 33 | 1.38 | 1.41 | 1.69 | 0.94 | 2.52 | 2.42 | 0.8 | Y | 1.59 |
| Loop2_L8 | 46 | 2.44 | 1.83 | 1.33 | 0.74 | 1.39 | 2.04 | 1.06 | Y | 1.55 |
| Loop2_L5 | 43 | 1.61 | 1.42 | 1.87 | 1.24 | 2.13 | 1.45 | 0.96 | Y | 1.53 |
| Loop2_L10 | 48 | 1.11 | 1.74 | 1.35 | 1.04 | 2.63 | 1.49 | 0.91 | Y | 1.47 |
| Loop2_L1 | 39 | 1.87 | 1.22 | 1.13 | 1.17 | 2.18 | 1.72 | 0.89 | Y | 1.45 |
| M3 | 19 | 0.89 | 0.94 | 2.16 | 1.08 | 1.46 | 2.74 | 0.62 | no | 1.41 |
| Loop2_L9 | 47 | 1.39 | 1.12 | 1.46 | 0.91 | 2.09 | 1.82 | 0.85 | Y | 1.38 |
| Loop2_L4 | 42 | 1.87 | 1.54 | 1.39 | 0.66 | 2.55 | 0.93 | 0.64 | Y | 1.37 |
| M1 | 17 | 0.72 | 0.85 | 1.78 | 1.19 | 2.56 | 1.97 | 0.36 | no | 1.34 |
| Loop2_L6 | 44 | 0.96 | 1.76 | 1.76 | 1 | 1.45 | 1.08 | 0.78 | Y | 1.26 |
| Loop2_L7 | 45 | 0.99 | 1.14 | 1.28 | 1.52 | 2.16 | 1.06 | 0.59 | Y | 1.25 |
| M2 | 18 | 0.76 | 1.71 | 2.08 | 0.6 | 1.07 | 1.96 | 0.55 | no | 1.25 |
| sl2 cg | 22 | 1.48 | 1.08 | 0.92 | 0.87 | 1.22 | 2 | 1.02 | no | 1.23 |
| sl2 gc | 21 | 1.27 | 1.53 | 1.42 | 0.65 | 1.16 | 1.46 | 0.7 | no | 1.17 |
| Loop2_L11 | 49 | 1.08 | 0.6 | 1.26 | 1.03 | 1.52 | 1.19 | 0.88 | Y | 1.08 |
| Canonical | 16 | 1 | 1 | 1 | 1 | 1 | 1 | 1 | no | 1 |
| SpCas9 gRNA | | | | | | | | | | |
| core | | | | | | | | | | |
| Loop3_L11 | 61 | NA | 0.1 | 0.08 | 0 | 0.39 | 0.063 | 0 | Y | 0.1 |
| Loop3_L4 | 54 | 0.23 | 0.23 | 0.27 | 0.35 | 0.69 | 0.36 | 0.44 | Y | 0.37 |
| Loop3_L7 | 57 | 0.38 | 0.12 | 0.07 | 0.03 | 0.45 | 0.15 | 0.04 | Y | 0.18 |
| Loop3_L6 | 56 | 0.26 | 0.04 | 0.13 | 0.08 | 0.39 | 0.21 | 0.05 | Y | 0.16 |
| Loop3_L0 | 50 | 0.12 | 0.09 | 0.07 | 0.12 | 0.37 | NA | 0.14 | Y | 0.15 |
| Loop3_L10 | 60 | 0.35 | 0.03 | 0 | 0.04 | 0.35 | 0.06 | 0 | Y | 0.12 |
| Loop3_L9 | 59 | NA | 0 | 0 | 0.07 | 0.09 | 0.15 | 0.35 | Y | 0.1. |
| Loop3_L2 | 52 | 0.15 | 0.05 | 0 | 0.03 | 0.19 | 0.08 | 0.12 | Y | 0.09 |
| Loop3_L3 | 53 | 0.22 | 0.05 | 0.03 | 0.03 | 0.04 | 0.15 | 0.07 | Y | 0.08 |
| Loop3_L1 | 51 | 0 | 0.28 | 0 | 0.16 | 0 | 0.11 | 0 | Y | 0.08 |
| Loop3_L5 | 55 | 0.26 | 0.07 | 0 | 0 | 0.05 | 0.079 | 0.05 | Y | 0.07 |
| Loop3_L8 | 58 | 0.1 | 0.04 | 0.16 | 0 | 0.09 | 0.09 | 0 | Y | 0.07 |

[0445] To examine tag sequence modification of PEgRNAs, PEgRNAs were designed for prime editing of five human genes (ATP7B, EMX1, SLC37A4, HEK3, and RHO). Seven target loci were tested: (correction of H1069Q or R778L for ATP, G-C substitution and CTT insertion for HEK3, correction of P23H for RHO, correction of G339C for SLC37A4, and insertion for EMX1) as indicated in FIGS. 6 and 7. For each PEgRNA, a tag sequence of various length and complementarity position with the editing template and/or PBS was added at the 3′ end of the PBS, such that the PEgRNA contains, from 5′ to 3′: the spacer, the gRNA core, the editing template, the PBS, and the tag sequence. A linker sequence from 1-6 nucleotides in length was also included between the PBS and the tag sequence. The linkers contained randomized nucleotide sequences, with any sequence having complementarity or identity to PBS, editing template, spacer, and tag sequence and sequences that would form additional secondary structure removed from the linker pool. The PEgRNA library was assembled, and prime editing efficiency was examined as described in Example 1.

[0446] The editing results in comparison to control PEgRNAs without the tag sequence for each target are shown in FIGS. 6 and 7. In each diagram, the horizontal solid line indicates editing efficiency with the control PEgRNA (horizontal dashed lines above and below the solid line indicates error margin of editing efficiency with the control PEgRNA). The vertical dashed line indicates the position of the junction between the editing template and the PBS. On the X axis, position 0 corresponds to the 5′ most position of the editing template. The “Comp-tag Start Position” on the X axis indicates the position of the tag sequence when hybridized to the editing template and/or RTT sequence via complementarity, where the “start position” of the tag sequence complementarity corresponding to the 5′ most position on region of the extension arm that is complementary to the tag sequence. For example, a start position being position 5 indicates that the extension arm has a region that is complementary to the tag sequence, and the 5′ most (the “first”) nucleotide in such region is at position 5, with position 0 being the 5′ most nucleotide of the editing template. For each start position, two PEgRNAs having the same tag sequence and the different linker sequence were tested, and the results are indicted by the two data points at each start position. For ATP7B H1069Q locus, tag sequence of 4, 6, and 8 nucleotides in length were tested (FIG. 6; 4Mer tag refers to a length of the tag sequence being 4 nucleotides). 8 nucleotide long tag sequences were tested for the other loci.

[0447] To examine editing efficiency of legRNAs, PEgRNAs were designed for prime editing seven target loci in five human genes (ATP7B, EMX1, SLC37A4, HEK3, and FANCF) as indicated in FIG. 9. Each PEgRNA contains, from 5′ to 3′: the spacer, the first half of the gRNA core, the editing template, the PBS, and the second half o the gRNA core. A linker is also included in between the PBS and the second half of the gRNA core. Sequences of the first half and second half of the gRNA core are provided below;

First half of gRNA core:
(SEQ ID NO: 6376)
GTTTAAGAGCTAGAAATAGCAAGTTTAAATAAGGCTAGTC
CGTTATCAGCGTGA
Second half of gRNA core:
(SEQ ID NO: 6377)
AAACGCGGCACCGAGTCGGTGC

[0448] PEgRNA library was assembled, and prime editing efficiency was examined as described in Example 1. The editing results in comparison to control PEgRNAs that has a configuration of 5′-spacer-gRNA core-editing template-PBS-3′ are shown in FIG. 9, where the horizontal solid line indicates editing efficiency with the control PEgRNA and horizontal dashed lines above and below the solid line indicates error margin of editing efficiency with the control PEgRNA.

[0449] To examine editing efficiency of 3′ nucleic acid moieties, PEgRNAs were designed for prime editing three target loci human genes EMX1, HEK3, and FANCF. For each PEgRNA, a nucleotide moiety as shown in FIG. 1 was added to the 3′ end of the PBS. An 8 nucleotide linker was also included between the 3′ moiety and the PBS (linker sequence: AACAUUGA), such that each PEgRNA contains, from 5′ to 3′: the spacer, the gRNA core, the editing template, the PBS, the linker, and the 3′ nucleic acid moiety. Sequences of the 3′ nucleic acid moieties are provided in Table 3. For each 3′ nucleic acid moiety at a particular target locus, 48 unique PEgRNAs with the same 3′ nucleic acid moiety and each having a unique combination selected from 1 spacer, 3 nucleotide edit in the editing template, 4 PBS lengths, and 4 editing template lengths. PEgRNA library was assembled, and prime editing efficiency was examined as described in Example 1. For each nucleic acid moiety, editing efficiency using the 48 PEgRNAs having the nucleic acid moiety was plotted and the results in comparison to control PEgRNAs that has the 8 nucleotide linker only and not the 3′ moiety are shown in FIG. 2. In each violin plot in FIG. 2, “linker” refers to editing with the control PEgRNA. HP1, HP2, HP3, HP4, HP5, and PLRV each refers to hp_1 (SEQ ID NO:1), hp_2 (SEQ ID NO: 7), hp_3 (SEQ ID NO: 3), hp_4 (SEQ ID NO: 6), hp_5 (SEQ ID NO: 5), and PLRV_22 (SEQ ID NO:4), respectively, in the structure as shown in FIG. 1 and the sequences in Table 3.

### Example 3—Prime Editing of Human Gene Targets with Tag-Modified PEgRNA Sequences

[0450] In this example, the effect of various tag parameters on prime editing efficiency is further examined. PEgRNAs with various spacer, PBS, and RTT combinations targeting a locus in one of seven human genes (APT7B, NCF1, HEK3, EMX1, FANCF, RHO, and SLC37A4) were tested with and without tag sequences. For each PEgRNA, a tag sequence of various length and complementarity position with the editing template and/or PBS was added at the 3′ end of the PBS, such that the PEgRNA contains, from 5′ to 3′: the spacer, the gRNA core, the editing template, the PBS, and the tag sequence. The tag sequences used varied in length between 4 and 24 nucleotides. Linker sequences were included between the PBS and the tag sequence. The linkers contained randomized nucleotide sequences 4, 5, or 6 nucleotides in length, with any sequences that would form additional secondary structure or that had complementarity to the PBS, editing template, spacer, or tag sequence removed from the linker pool. The PEgRNA libraries were assembled, and prime editing efficiency was examined as described in Example 1.

[0451] The effect of binding position on editing efficiency is examined in FIG. 13. In the graphs of FIG. 13, the x-axis shows the binding position of the 3′-most nucleotide of the tag relative to the RTT/PBS boundary, with position 0 representing the first nucleotide in the PBS. For a 4 mer tag (i.e., a tag 4 nucleotides in length), a binding position of −4 or less (i.e., −5, −6, −7, etc.) binds completely within the RTT, while a binding position of −3 or more binds at least partially within the PBS. The y-axis in FIG. 13 is the fold change in editing percentage of the tagged version of the PEgRNA verses the untagged version. Each dot shows the fold change for a single pair of PEgRNA (tagged vs. untagged). The average fold change for all PEgRNA of the indicated length having a tag binding at the same position is shown in the solid line on the graph. FIG. 13A shows the results for 4mer tags, FIG. 13B shows the results for 6 mer tags, and FIG. 13C shows the results for 8 mer tags. In each graph, there was a bump in the average fold change line in the region where the tags bind completely within the edit template.

[0452] A second analysis was performed to examine the effect of tag length on prime editing performance. Based on the previous analyses, only those tags that bind completely within the edit template were included. The results are shown in FIG. 14 with the corresponding data in Table 18 below. In FIG. 14, the x-axis is the length of the tag (labeled Length of CompTag) and the y-axis is the fold change in percent editing of the tagged version of a PEgRNA verses the untagged version of the same PEgRNA. Each dot shows the fold change for a single pair of PEgRNA (tagged vs. untagged). The average fold change for all PEgRNA of the indicated length having a tag binding at the same position is shown in the solid line.

TABLE 18
The effect of tag length on prime editing efficiency.

| | | Percent w/ | Percent w/ | Percent w/ |
|---|---|---|---|---|
| | | 1.01 Fold | 1.5 Fold | 2 Fold |
| Tag Length | Total Tags | Improvement | Improvement | Improvement |
| (nt) | Tested | or Greater | or Greater | or Greater |
| 4 | 327 | 39.14% | 20.18% | 11.93% |
| 6 | 245 | 51.84% | 38.37% | 28.57% |
| 8 | 432 | 46.76% | 30.09% | 17.36% |
| 10 | 187 | 31.02% | 12.30% | 2.67% |
| 12 | 139 | 22.30% | 7.19% | 0.72% |
| 14 | 102 | 18.63% | 5.88% | 2.94% |
| 16 | 74 | 18.92% | 4.05% | 2.70% |
| 18 | 54 | 11.11% | 3.70% | 0.00% |
| 20 | 35 | 8.57% | 2.86% | 2.86% |
| 22 | 17 | 17.65% | 0.00% | 0.00% |
| 24 | 3 | 0.00% | 0.00% | 0.00% |

### Example 4. Prime Editing of Human Gene Targets with PEgRNAs Having gRNA Core Modifications

[0453] The effect of gRNA core modifications on prime editing efficiency was examined. PEgRNAs were designed for targeting and editing one locus in each of three human genes, referred to as target 1, target 2, and target 3, respectively. Each PEgRNA contains, from 5′ to 3′: a spacer, a gRNA core, and an extension arm that includes an editing template and a PBS. For each of targets 1, 2, and 3, all examined PEgRNAs have the same spacer sequence and the same extension arm sequence, and each contained a different gRNA core sequence: one control PEgRNA contains the canonical SpCas9 gRNA core according to SEQ ID NO: 16, and 492 examined PEgRNAs each contains a gRNA core that harbors one or more nucleotide modifications relative to SEQ ID NO: 16. Sequences of the gRNA cores are provided in Table 2.

[0454] The PEgRNAs were examined for editing of targets 1, 2, and 3 and prime editing efficiency in lentiviral transduced HEK293T cells as described in Example 1. The effect of gRNA core modifications on prime editing efficiency is shown in Table 16. Table 16 contains eight columns. From left to right, column 1 provides a brief name of the gRNA core, and column 2 provides the SEQ ID NO of each gRNA core. Columns 3-5 provide editing efficiency at target sites 1-3, respectively: for each target site, the editing efficiency of each modified PEgRNA was normalized to the editing efficiency of the control PEgRNA: Fold change=Editing Efficiency (modified gRNA core)/Editing Efficiency control, wherein the control PEgRNA has the canonical SpCas9 gRNA core according to SEQ ID NO: 16. For each PEgRNA, two replicates were tested, and the average fold change is reported. Column 6 reports the average fold change of columns 3-5. Column 7 provides nucleotide insertion location, for example, extension in the upper stem of the tetraloop (e.g., replacing nucleotides 11-12 of SEQ ID NO: 16 with 3, 4, or 5 contiguous nucleotides and replacing nucleotides 16-17 with the reverse complement of the 3, 4, or 5 contiguous nucleotide; complementary insertions between nucleotides 12 and 13 and between nucleotides 16 and 17 compared to SEQ ID NO: 16), or extension in stem loop 2 (e.g., replacing nucleotides 49-52 of SEQ ID NO: 16 with 7 or more contiguous nucleotides and replacing nucleotides 57-60 with the reverse complement of the 7 or more contiguous nucleotides; or complementary insertions between nucleotides 52 and 53 and between nucleotides 56-57 compared to SEQ ID NO: 16). Column 8 provides the length of the extension in basepairs; for example, a 2 basepair extension in stem loop 2 means complementary insertions of 2 nucleotides on each side of stem loop 2. Except for the control PEgRNA sequences and SEQ ID NO: 4351, other tested extended gRNA core sequences also included a “M4” modification (a U to A substitution at nucleotide 5 and an A to U substitution at nucleotide 26 relative to SEQ ID NO: 16).

[0455] PEgRNAs and corresponding editing efficiency in Table 16 are provided in ascending order from top to bottom. For both PEgRNAs having an extended tetraloop and PEgRNAs having an extended stem loop 2, improved average editing efficiency over the canonical SpCas9 PEgRNA was observed. Compared to PEgRNAs having the canonical SpCas9 gRNA core sequence, 491 of the 492 tested PEgRNAs showed increased or comparable editing efficiency for at least one target site, and 487 tested PEgRNAs showed increased average editing efficiency.

TABLE 16
Prime editing efficiency with PEgRNAs having modified gRNA cores.

| | gRNA | | | | | | |
|---|---|---|---|---|---|---|---|
| gRNA | core | target 1 | target 2 | target 3 | | | Extension |
| core | SEQ ID | Ave. fold | Ave. fold | Ave. fold | Ave. fold | Extended | base pair |
| name | NO. | change | change | change | change | feature | length |
| L2_e8_20 | 4254 | 0.32 | 0.19 | 0.08 | 0.20 | Stem loop 2 | 8 |
| L2_e6_94 | 4153 | 1.08 | 0.31 | 0.16 | 0.52 | Stem loop 2 | 6 |
| L2_e8_5 | 4239 | 0.90 | 0.94 | 0.38 | 0.74 | Stem loop 2 | 8 |
| L2_e7_12 | 4171 | 1.49 | 0.71 | 0.52 | 0.91 | Stem loop 2 | 7 |
| L2_e7_22 | 4181 | 1.46 | 0.89 | 0.49 | 0.95 | Stem loop 2 | 7 |
| canonical | 4350 or 16 | 1.00 | 1.00 | 1.00 | 1.00 | none | 0 |
| SpCas9 | | | | | | | |
| L2_e7_29 | 4188 | 1.42 | 1.08 | 0.53 | 1.01 | Stem loop 2 | 7 |
| L2_e8_22 | 4256 | 1.58 | 1.10 | 0.49 | 1.06 | Stem loop 2 | 8 |
| L2_e8_9 | 4243 | 1.59 | 0.92 | 0.70 | 1.07 | Stem loop 2 | 8 |
| L2_e6_85 | 4144 | 1.06 | 1.33 | 0.81 | 1.07 | Stem loop 2 | 6 |
| L2_e7_46 | 4205 | 1.82 | 0.66 | 0.77 | 1.08 | Stem loop 2 | 7 |
| L2_e7_58 | 4217 | 2.13 | 0.75 | 0.44 | 1.11 | Stem loop 2 | 7 |
| L2_e7_23 | 4182 | 1.51 | 1.30 | 0.51 | 1.11 | Stem loop 2 | 7 |
| L2_e8_11 | 4245 | 1.82 | 1.20 | 0.40 | 1.14 | Stem loop 2 | 8 |
| L2_e7_60 | 4219 | 2.00 | 0.94 | 0.55 | 1.16 | Stem loop 2 | 7 |
| L2_e6_6 | 4065 | 1.53 | 1.25 | 0.71 | 1.17 | Stem loop 2 | 6 |
| L2_e5_24 | 3983 | 1.81 | 1.20 | 0.51 | 1.17 | Stem loop 2 | 5 |
| L2_e7_10 | 4169 | 1.80 | 0.93 | 0.80 | 1.17 | Stem loop 2 | 7 |
| T_e2_12 | 4303 | 1.41 | 1.33 | 0.78 | 1.17 | Tetraloop | 2 |
| L2_e4_19 | 3903 | 1.25 | 1.71 | 0.61 | 1.19 | Stem loop 2 | 4 |
| L2_e6_95 | 4154 | 1.81 | 1.23 | 0.54 | 1.19 | Stem loop 2 | 6 |
| L2_e7_56 | 4215 | 1.87 | 1.07 | 0.66 | 1.20 | Stem loop 2 | 7 |
| L2_e8_23 | 4257 | 1.90 | 1.09 | 0.64 | 1.21 | Stem loop 2 | 8 |
| L2_e7_1 | 4160 | 1.82 | 1.35 | 0.51 | 1.23 | Stem loop 2 | 7 |
| L2_e6_76 | 4135 | 1.62 | 1.47 | 0.59 | 1.23 | Stem loop 2 | 6 |
| L2_e6_56 | 4115 | 2.07 | 1.02 | 0.59 | 1.23 | Stem loop 2 | 6 |
| L2_e6_38 | 4097 | 1.71 | 1.36 | 0.64 | 1.24 | Stem loop 2 | 6 |
| L2_e8_14 | 4248 | 2.15 | 0.71 | 0.86 | 1.24 | Stem loop 2 | 8 |
| L2_e7_32 | 4191 | 1.66 | 1.60 | 0.46 | 1.24 | Stem loop 2 | 7 |
| L2_e7_48 | 4207 | 2.01 | 1.05 | 0.66 | 1.24 | Stem loop 2 | 7 |
| L2_e5_26 | 3985 | 1.55 | 1.69 | 0.53 | 1.26 | Stem loop 2 | 5 |
| L2_e7_30 | 4189 | 2.36 | 0.78 | 0.64 | 1.26 | Stem loop 2 | 7 |
| L2_e7_37 | 4196 | 1.90 | 1.30 | 0.58 | 1.26 | Stem loop 2 | 7 |
| L2_e7_9 | 4168 | 1.91 | 1.22 | 0.68 | 1.27 | Stem loop 2 | 7 |
| L2_e7_16 | 4175 | 1.88 | 1.21 | 0.74 | 1.27 | Stem loop 2 | 7 |
| L2_e4_16 | 3900 | 1.67 | 1.37 | 0.79 | 1.28 | Stem loop 2 | 4 |
| L2_e6_81 | 4140 | 1.99 | 1.26 | 0.59 | 1.28 | Stem loop 2 | 6 |
| T_e2_23 | 4314 | 2.37 | 0.77 | 0.70 | 1.28 | Tetraloop | 2 |
| L2_e7_6 | 4165 | 2.12 | 1.28 | 0.44 | 1.28 | Stem loop 2 | 7 |
| L2_e6_8 | 4067 | 2.01 | 1.09 | 0.75 | 1.28 | Stem loop 2 | 6 |
| L2_e7_67 | 4226 | 1.54 | 1.55 | 0.76 | 1.28 | Stem loop 2 | 7 |
| L2_e7_24 | 4183 | 1.88 | 1.22 | 0.79 | 1.30 | Stem loop 2 | 7 |
| L2_e6_13 | 4072 | 1.73 | 1.44 | 0.73 | 1.30 | Stem loop 2 | 6 |
| L2_e5_44 | 4003 | 1.91 | 1.18 | 0.81 | 1.30 | Stem loop 2 | 5 |
| L2_e6_66 | 4125 | 1.60 | 1.70 | 0.61 | 1.30 | Stem loop 2 | 6 |
| L2_e7_64 | 4223 | 1.80 | 1.44 | 0.67 | 1.30 | Stem loop 2 | 7 |
| L2_e4_29 | 3913 | 1.54 | 1.56 | 0.82 | 1.30 | Stem loop 2 | 4 |
| L2_e7_68 | 4227 | 1.96 | 1.20 | 0.76 | 1.31 | Stem loop 2 | 7 |
| L2_e8_24 | 4258 | 1.90 | 1.05 | 0.98 | 1.31 | Stem loop 2 | 8 |
| L2_e6_4 | 4063 | 2.03 | 1.25 | 0.67 | 1.32 | Stem loop 2 | 6 |
| L2_e5_6 | 3965 | 2.16 | 1.26 | 0.54 | 1.32 | Stem loop 2 | 5 |
| L2_e7_69 | 4228 | 2.12 | 1.23 | 0.61 | 1.32 | Stem loop 2 | 7 |
| L2_e7_45 | 4204 | 1.36 | 1.84 | 0.76 | 1.32 | Stem loop 2 | 7 |
| L2_e6_55 | 4114 | 1.91 | 1.31 | 0.76 | 1.33 | Stem loop 2 | 6 |
| L2_e7_65 | 4224 | 1.57 | 1.56 | 0.85 | 1.33 | Stem loop 2 | 7 |
| L2_e8_15 | 4249 | 1.61 | 1.60 | 0.78 | 1.33 | Stem loop 2 | 8 |
| L2_e6_99 | 4158 | 2.37 | 0.88 | 0.74 | 1.33 | Stem loop 2 | 6 |
| L2_e5_3 | 3962 | 2.19 | 1.35 | 0.46 | 1.34 | Stem loop 2 | 5 |
| L2_e6_12 | 4071 | 1.65 | 1.49 | 0.87 | 1.34 | Stem loop 2 | 6 |
| L2_e5_66 | 4025 | 1.99 | 1.33 | 0.70 | 1.34 | Stem loop 2 | 5 |
| L2_e6_41 | 4100 | 2.06 | 1.22 | 0.76 | 1.35 | Stem loop 2 | 6 |
| L2_e6_78 | 4137 | 1.74 | 1.61 | 0.69 | 1.35 | Stem loop 2 | 6 |
| L2_e4_61 | 3945 | 1.33 | 1.72 | 1.00 | 1.35 | Stem loop 2 | 4 |
| L2_e6_63 | 4122 | 1.60 | 1.58 | 0.89 | 1.35 | Stem loop 2 | 6 |
| L2_e7_74 | 4233 | 2.19 | 1.15 | 0.72 | 1.35 | Stem loop 2 | 7 |
| L2_e7_51 | 4210 | 2.67 | 0.98 | 0.41 | 1.35 | Stem loop 2 | 7 |
| L2_e6_88 | 4147 | 1.85 | 1.63 | 0.59 | 1.35 | Stem loop 2 | 6 |
| L2_e4_22 | 3906 | 1.36 | 1.86 | 0.85 | 1.36 | Stem loop 2 | 4 |
| L2_e6_62 | 4121 | 1.60 | 1.80 | 0.67 | 1.36 | Stem loop 2 | 6 |
| L2_e7_72 | 4231 | 1.92 | 1.52 | 0.62 | 1.36 | Stem loop 2 | 7 |
| L2_e5_52 | 4011 | 1.68 | 1.65 | 0.75 | 1.36 | Stem loop 2 | 5 |
| L2_e6_21 | 4080 | 2.21 | 1.17 | 0.70 | 1.36 | Stem loop 2 | 6 |
| L2_e7_70 | 4229 | 2.12 | 1.25 | 0.71 | 1.36 | Stem loop 2 | 7 |
| L2_e8_16 | 4250 | 2.22 | 1.47 | 0.40 | 1.36 | Stem loop 2 | 8 |
| L2_e7_35 | 4194 | 1.75 | 1.76 | 0.59 | 1.36 | Stem loop 2 | 7 |
| L2_e7_53 | 4212 | 2.09 | 1.30 | 0.70 | 1.37 | Stem loop 2 | 7 |
| L2_e5_19 | 3978 | 2.04 | 1.16 | 0.90 | 1.37 | Stem loop 2 | 5 |
| L2_e5_93 | 4052 | 2.16 | 1.29 | 0.66 | 1.37 | Stem loop 2 | 5 |
| L2_e6_9 | 4068 | 2.08 | 1.26 | 0.77 | 1.37 | Stem loop 2 | 6 |
| L2_e5_50 | 4009 | 1.84 | 1.46 | 0.80 | 1.37 | Stem loop 2 | 5 |
| L2_e6_40 | 4099 | 2.34 | 1.22 | 0.55 | 1.37 | Stem loop 2 | 6 |
| L2_e7_2 | 4161 | 1.80 | 1.68 | 0.62 | 1.37 | Stem loop 2 | 7 |
| L2_e7_47 | 4206 | 2.01 | 1.36 | 0.74 | 1.37 | Stem loop 2 | 7 |
| L2_e6_24 | 4083 | 2.08 | 1.43 | 0.60 | 1.37 | Stem loop 2 | 6 |
| L2_e6_75 | 4134 | 1.65 | 1.66 | 0.81 | 1.37 | Stem loop 2 | 6 |
| L2_e7_61 | 4220 | 2.12 | 1.30 | 0.69 | 1.37 | Stem loop 2 | 7 |
| L2_e7_7 | 4166 | 1.60 | 1.81 | 0.72 | 1.38 | Stem loop 2 | 7 |
| L2_e5_21 | 3980 | 2.43 | 1.00 | 0.70 | 1.38 | Stem loop 2 | 5 |
| L2_e6_25 | 4084 | 1.98 | 1.46 | 0.71 | 1.38 | Stem loop 2 | 6 |
| L2_e6_27 | 4086 | 2.02 | 1.38 | 0.75 | 1.38 | Stem loop 2 | 6 |
| L2_e6_54 | 4113 | 2.04 | 1.47 | 0.64 | 1.38 | Stem loop 2 | 6 |
| L2_e4_6 | 3890 | 1.69 | 1.56 | 0.90 | 1.38 | Stem loop 2 | 4 |
| L2_e4_63 | 3947 | 2.08 | 1.39 | 0.67 | 1.38 | Stem loop 2 | 4 |
| L2_e6_59 | 4118 | 1.90 | 1.41 | 0.84 | 1.38 | Stem loop 2 | 6 |
| L2_e7_13 | 4172 | 2.34 | 1.34 | 0.48 | 1.39 | Stem loop 2 | 7 |
| L2_e7_15 | 4174 | 2.17 | 1.13 | 0.87 | 1.39 | Stem loop 2 | 7 |
| L2_e7_59 | 4218 | 1.77 | 1.73 | 0.67 | 1.39 | Stem loop 2 | 7 |
| L2_e5_45 | 4004 | 1.64 | 1.64 | 0.89 | 1.39 | Stem loop 2 | 5 |
| L2_e7_66 | 4225 | 1.68 | 1.63 | 0.87 | 1.39 | Stem loop 2 | 7 |
| L2_e7_39 | 4198 | 2.34 | 1.20 | 0.63 | 1.39 | Stem loop 2 | 7 |
| L2_e8_1 | 4235 | 1.94 | 1.62 | 0.61 | 1.39 | Stem loop 2 | 8 |
| L2_e7_36 | 4195 | 2.02 | 1.40 | 0.77 | 1.40 | Stem loop 2 | 7 |
| L2_e5_65 | 4024 | 2.19 | 1.25 | 0.75 | 1.40 | Stem loop 2 | 5 |
| L2_e5_49 | 4008 | 2.17 | 1.28 | 0.74 | 1.40 | Stem loop 2 | 5 |
| L2_e6_19 | 4078 | 1.65 | 1.78 | 0.77 | 1.40 | Stem loop 2 | 6 |
| L2_e7_19 | 4178 | 2.08 | 1.24 | 0.90 | 1.41 | Stem loop 2 | 7 |
| L2_e7_8 | 4167 | 2.00 | 1.48 | 0.74 | 1.41 | Stem loop 2 | 7 |
| L2_e7_41 | 4200 | 2.04 | 1.42 | 0.77 | 1.41 | Stem loop 2 | 7 |
| L2_e8_8 | 4242 | 2.30 | 1.45 | 0.48 | 1.41 | Stem loop 2 | 8 |
| L2_e6_15 | 4074 | 2.14 | 1.46 | 0.64 | 1.41 | Stem loop 2 | 6 |
| L2_e7_44 | 4203 | 2.60 | 0.84 | 0.79 | 1.41 | Stem loop 2 | 7 |
| L2_e6_5 | 4064 | 2.26 | 1.27 | 0.71 | 1.41 | Stem loop 2 | 6 |
| L2_e6_69 | 4128 | 2.11 | 1.47 | 0.67 | 1.42 | Stem loop 2 | 6 |
| L2_e6_2 | 4061 | 1.79 | 1.72 | 0.74 | 1.42 | Stem loop 2 | 6 |
| L2_e5_86 | 4045 | 1.64 | 1.90 | 0.70 | 1.42 | Stem loop 2 | 5 |
| L2_e6_97 | 4156 | 2.36 | 1.37 | 0.53 | 1.42 | Stem loop 2 | 6 |
| L2_e4_3 | 3887 | 1.99 | 1.45 | 0.83 | 1.42 | Stem loop 2 | 4 |
| L2_e3_25 | 3884 | 2.05 | 1.20 | 1.01 | 1.42 | Stem loop 2 | 3 |
| L2_e3_12 | 3871 | 2.18 | 1.26 | 0.83 | 1.42 | Stem loop 2 | 3 |
| L2_e6_49 | 4108 | 2.28 | 1.38 | 0.62 | 1.43 | Stem loop 2 | 6 |
| L2_e5_55 | 4014 | 1.95 | 1.15 | 1.18 | 1.43 | Stem loop 2 | 5 |
| L2_e5_29 | 3988 | 1.87 | 1.47 | 0.94 | 1.43 | Stem loop 2 | 5 |
| L2_e5_25 | 3984 | 1.75 | 1.59 | 0.95 | 1.43 | Stem loop 2 | 5 |
| L2_e6_65 | 4124 | 2.74 | 0.71 | 0.83 | 1.43 | Stem loop 2 | 6 |
| L2_e7_52 | 4211 | 1.97 | 1.75 | 0.57 | 1.43 | Stem loop 2 | 7 |
| L2_e5_99 | 4058 | 2.21 | 1.36 | 0.73 | 1.43 | Stem loop 2 | 5 |
| L2_e5_80 | 4039 | 2.19 | 1.28 | 0.84 | 1.44 | Stem loop 2 | 5 |
| L2_e7_42 | 4201 | 2.09 | 1.54 | 0.68 | 1.44 | Stem loop 2 | 7 |
| L2_e7_17 | 4176 | 2.06 | 1.52 | 0.73 | 1.44 | Stem loop 2 | 7 |
| L2_e6_39 | 4098 | 2.22 | 1.41 | 0.70 | 1.44 | Stem loop 2 | 6 |
| L2_e7_27 | 4186 | 1.74 | 1.69 | 0.91 | 1.45 | Stem loop 2 | 7 |
| L2_e7_62 | 4221 | 2.14 | 1.38 | 0.83 | 1.45 | Stem loop 2 | 7 |
| L2_e5_68 | 4027 | 2.06 | 1.31 | 0.98 | 1.45 | Stem loop 2 | 5 |
| L2_e6_98 | 4157 | 1.85 | 1.78 | 0.73 | 1.45 | Stem loop 2 | 6 |
| L2_e5_96 | 4055 | 2.66 | 1.06 | 0.64 | 1.45 | Stem loop 2 | 5 |
| L2_e6_73 | 4132 | 2.61 | 1.20 | 0.55 | 1.45 | Stem loop 2 | 6 |
| L2_e5_46 | 4005 | 2.41 | 1.16 | 0.81 | 1.46 | Stem loop 2 | 5 |
| L2_e6_29 | 4088 | 2.01 | 1.73 | 0.63 | 1.46 | Stem loop 2 | 6 |
| L2_e5_41 | 4000 | 1.98 | 1.59 | 0.81 | 1.46 | Stem loop 2 | 5 |
| L2_e6_30 | 4089 | 1.79 | 1.90 | 0.70 | 1.46 | Stem loop 2 | 6 |
| L2_e7_33 | 4192 | 1.77 | 1.71 | 0.91 | 1.46 | Stem loop 2 | 7 |
| L2_e5_79 | 4038 | 2.36 | 1.41 | 0.64 | 1.47 | Stem loop 2 | 5 |
| L2_e7_11 | 4170 | 2.26 | 1.56 | 0.61 | 1.48 | Stem loop 2 | 7 |
| L2_e8_21 | 4255 | 1.96 | 1.63 | 0.84 | 1.48 | Stem loop 2 | 8 |
| L2_e5_81 | 4040 | 2.12 | 1.60 | 0.72 | 1.48 | Stem loop 2 | 5 |
| L2_e5_9 | 3968 | 1.80 | 1.76 | 0.88 | 1.48 | Stem loop 2 | 5 |
| L2_e5_28 | 3987 | 1.80 | 1.72 | 0.94 | 1.48 | Stem loop 2 | 5 |
| L2_e6_1 | 4060 | 2.27 | 1.54 | 0.66 | 1.49 | Stem loop 2 | 6 |
| L2_e5_13 | 3972 | 1.81 | 1.68 | 0.99 | 1.49 | Stem loop 2 | 5 |
| L2_e3_19 | 3878 | 2.00 | 1.48 | 1.00 | 1.49 | Stem loop 2 | 3 |
| L2_e7_5 | 4164 | 2.54 | 1.31 | 0.63 | 1.49 | Stem loop 2 | 7 |
| L2_e8_17 | 4251 | 2.43 | 1.33 | 0.72 | 1.49 | Stem loop 2 | 8 |
| L2_e4_70 | 3954 | 1.96 | 1.55 | 0.98 | 1.50 | Stem loop 2 | 4 |
| L2_e7_3 | 4162 | 2.29 | 1.34 | 0.88 | 1.50 | Stem loop 2 | 7 |
| L2_e7_14 | 4173 | 2.25 | 1.53 | 0.74 | 1.50 | Stem loop 2 | 7 |
| L2_e5_47 | 4006 | 2.25 | 1.43 | 0.83 | 1.50 | Stem loop 2 | 5 |
| L2_e6_74 | 4133 | 1.99 | 1.87 | 0.66 | 1.51 | Stem loop 2 | 6 |
| L2_e6_28 | 4087 | 2.39 | 1.33 | 0.80 | 1.51 | Stem loop 2 | 6 |
| L2_e7_34 | 4193 | 2.17 | 1.79 | 0.57 | 1.5 | Stem loop 2 | 7 |
| L2_e4_71 | 3955 | 1.97 | 1.6 | 0.95 | 1.5 | Stem loop 2 | 4 |
| L2_e7_43 | 4202 | 2.45 | 1.50 | 0.58 | 1.51 | Stem loop 2 | 7 |
| L2_e7_25 | 4184 | 2.36 | 1.25 | 0.91 | 1.51 | Stem loop 2 | 7 |
| L2_e6_92 | 4151 | 2.04 | 1.69 | 0.80 | 1.51 | Stem loop 2 | 6 |
| L2_e7_4 | 4163 | 2.10 | 1.64 | 0.79 | 1.51 | Stem loop 2 | 7 |
| L2_e4_56 | 3940 | 1.78 | 1.91 | 0.84 | 1.51 | Stem loop 2 | 4 |
| L2_e4_17 | 3901 | 2.10 | 1.66 | 0.77 | 1.5 | Stem loop 2 | 4 |
| L2_e6_47 | 4106 | 2.31 | 1.43 | 0.80 | 1.51 | Stem loop 2 | 6 |
| L2_e6_18 | 4077 | 2.24 | 1.66 | 0.65 | 1.51 | Stem loop 2 | 6 |
| L2_e4_47 | 3931 | 2.17 | 1.39 | 0.99 | 1.51 | Stem loop 2 | 4 |
| L2_e8_13 | 4247 | 2.31 | 1.36 | 0.88 | 1.52 | Stem loop 2 | 8 |
| L2_e4_64 | 3948 | 1.75 | 1.80 | 1.00 | 1.52 | Stem loop 2 | 4 |
| L2_e5_91 | 4050 | 1.79 | 1.95 | 0.82 | 1.52 | Stem loop 2 | 5 |
| L2_e4_52 | 3936 | 2.38 | 1.50 | 0.67 | 1.52 | Stem loop 2 | 4 |
| L2_e6_33 | 4092 | 2.72 | 1.06 | 0.78 | 1.52 | Stem loop 2 | 6 |
| L2_e5_74 | 4033 | 2.11 | 1.71 | 0.75 | 1.52 | Stem loop 2 | 5 |
| L2_e5_94 | 4053 | 1.97 | 1.80 | 0.79 | 1.52 | Stem loop 2 | 5 |
| L2_e6_90 | 4149 | 2.60 | 1.19 | 0.77 | 1.52 | Stem loop 2 | 6 |
| L2_e7_26 | 4185 | 2.18 | 1.68 | 0.70 | 1.52 | Stem loop 2 | 7 |
| T_e1b_12 | 4279 | 2.44 | 1.19 | 0.93 | 1.52 | Tetraloop | 1 |
| L2_e6_11 | 4070 | 2.44 | 1.37 | 0.77 | 1.53 | Stem loop 2 | 6 |
| L2_e5_51 | 4010 | 2.15 | 1.76 | 0.67 | 1.53 | Stem loop 2 | 5 |
| L2_e4_57 | 3941 | 2.19 | 1.57 | 0.82 | 1.53 | Stem loop 2 | 4 |
| L2_e5_42 | 4001 | 1.93 | 1.86 | 0.79 | 1.53 | Stem loop 2 | 5 |
| L2_e7_57 | 4216 | 2.31 | 1.6 | 0.67 | 1.53 | Stem loop 2 | 7 |
| L2_e4_58 | 3942 | 2.10 | 1.38 | 1.12 | 1.53 | Stem loop 2 | 4 |
| L2_e6_3 | 4062 | 2.74 | 1.22 | 0.64 | 1.53 | Stem loop 2 | 6 |
| L2_e6_20 | 4079 | 2.27 | 1.55 | 0.77 | 1.53 | Stem loop 2 | 6 |
| L2_e6_61 | 4120 | 2.20 | 1.57 | 0.83 | 1.54 | Stem loop 2 | 6 |
| L2_e6_43 | 4102 | 2.07 | 1.69 | 0.85 | 1.54 | Stem loop 2 | 6 |
| L2_e8_19 | 4253 | 2.11 | 1.92 | 0.58 | 1.54 | Stem loop 2 | 8 |
| L2_e6_68 | 4127 | 2.71 | 1.07 | 0.83 | 1.54 | Stem loop 2 | 6 |
| L2_e6_26 | 4085 | 2.33 | 1.40 | 0.89 | 1.54 | Stem loop 2 | 6 |
| L2_e8_25 | 4259 | 1.82 | 2.15 | 0.65 | 1.54 | Stem loop 2 | 8 |
| L2_e5_92 | 4051 | 2.43 | 1.34 | 0.86 | 1.54 | Stem loop 2 | 5 |
| L2_e5_82 | 4041 | 1.98 | 1.95 | 0.71 | 1.55 | Stem loop 2 | 5 |
| L2_e6_70 | 4129 | 2.20 | 1.65 | 0.80 | 1.55 | Stem loop 2 | 6 |
| L2_e7_38 | 4197 | 2.33 | 1.65 | 0.67 | 1.55 | Stem loop 2 | 7 |
| L2_e5_54 | 4013 | 2.03 | 1.70 | 0.92 | 1.55 | Stem loop 2 | 5 |
| L2_e7_75 | 4234 | 2.38 | 1.49 | 0.79 | 1.55 | Stem loop 2 | 7 |
| L2_e5_75 | 4034 | 2.09 | 1.76 | 0.81 | 1.55 | Stem loop 2 | 5 |
| L2_e4_9 | 3893 | 2.16 | 1.52 | 0.99 | 1.56 | Stem loop 2 | 4 |
| L2_e5_33 | 3992 | 2.18 | 1.49 | 1.01 | 1.56 | Stem loop 2 | 5 |
| L2_e3_9 | 3868 | 1.92 | 1.84 | 0.92 | 1.56 | Stem loop 2 | 3 |
| L2_e6_37 | 4096 | 2.74 | 1.19 | 0.75 | 1.56 | Stem loop 2 | 6 |
| L2_e7_20 | 4179 | 2.03 | 1.91 | 0.74 | 1.56 | Stem loop 2 | 7 |
| L2_e4_12 | 3896 | 2.23 | 1.64 | 0.83 | 1.57 | Stem loop 2 | 4 |
| L2_e6_83 | 4142 | 2.24 | 1.51 | 0.94 | 1.57 | Stem loop 2 | 6 |
| L2_e4_30 | 3914 | 2.63 | 1.41 | 0.66 | 1.57 | Stem loop 2 | 4 |
| L2_e6_51 | 4110 | 2.52 | 1.56 | 0.63 | 1.57 | Stem loop 2 | 6 |
| L2_e4_45 | 3929 | 1.98 | 1.76 | 0.97 | 1.57 | Stem loop 2 | 4 |
| L2_e4_11 | 3895 | 2.62 | 1.31 | 0.78 | 1.57 | Stem loop 2 | 4 |
| L2_e6_93 | 4152 | 2.33 | 1.59 | 0.79 | 1.57 | Stem loop 2 | 6 |
| L2_e6_31 | 4090 | 2.71 | 1.20 | 0.80 | 1.57 | Stem loop 2 | 6 |
| L2_e4_14 | 3898 | 2.04 | 1.62 | 1.05 | 1.57 | Stem loop 2 | 4 |
| L2_e6_17 | 4076 | 2.12 | 1.65 | 0.94 | 1.57 | Stem loop 2 | 6 |
| L2_e6_16 | 4075 | 2.07 | 1.77 | 0.88 | 1.57 | Stem loop 2 | 6 |
| L2_e7_71 | 4230 | 2.21 | 1.87 | 0.64 | 1.57 | Stem loop 2 | 7 |
| L2_e4_42 | 3926 | 2.50 | 1.35 | 0.88 | 1.57 | Stem loop 2 | 4 |
| L2_e6_48 | 4107 | 2.39 | 1.21 | 1.13 | 1.58 | Stem loop 2 | 6 |
| L2_e6_79 | 4138 | 2.27 | 1.55 | 0.90 | 1.58 | Stem loop 2 | 6 |
| L2_e5_84 | 4043 | 2.63 | 1.49 | 0.61 | 1.58 | Stem loop 2 | 5 |
| L2_e3_16 | 3875 | 2.23 | 1.64 | 0.87 | 1.58 | Stem loop 2 | 3 |
| L2_e4_20 | 3904 | 2.49 | 1.16 | 1.08 | 1.58 | Stem loop 2 | 4 |
| L2_e5_38 | 3997 | 2.62 | 1.28 | 0.85 | 1.58 | Stem loop 2 | 5 |
| L2_e4_10 | 3894 | 1.95 | 1.94 | 0.86 | 1.58 | Stem loop 2 | 4 |
| L2_e6_23 | 4082 | 2.28 | 1.54 | 0.93 | 1.58 | Stem loop 2 | 6 |
| dnr6 | 4351 | 2.44 | 1.02 | 1.30 | 1.59 | Tetraloop | 1 |
| L2_e3_23 | 3882 | 2.35 | 1.58 | 0.84 | 1.59 | Stem loop 2 | 3 |
| L2_e6_67 | 4126 | 2.35 | 1.65 | 0.77 | 1.59 | Stem loop 2 | 6 |
| L2_e8_2 | 4236 | 1.84 | 1.79 | 1.14 | 1.59 | Stem loop 2 | 8 |
| L2_e5_1 | 3960 | 2.26 | 1.52 | 0.99 | 1.59 | Stem loop 2 | 5 |
| L2_e5_72 | 4031 | 2.50 | 1.58 | 0.69 | 1.59 | Stem loop 2 | 5 |
| L2_e6_82 | 4141 | 2.13 | 1.93 | 0.72 | 1.59 | Stem loop 2 | 6 |
| L2_e6_89 | 4148 | 2.80 | 0.94 | 1.05 | 1.59 | Stem loop 2 | 6 |
| L2_e5_85 | 4044 | 2.38 | 1.66 | 0.75 | 1.59 | Stem loop 2 | 5 |
| L2_e4_18 | 3902 | 2.46 | 1.42 | 0.91 | 1.60 | Stem loop 2 | 4 |
| L2_e8_3 | 4237 | 2.22 | 1.59 | 0.98 | 1.60 | Stem loop 2 | 8 |
| L2_e7_18 | 4177 | 2.08 | 1.82 | 0.90 | 1.60 | Stem loop 2 | 7 |
| L2_e6_80 | 4139 | 2.31 | 1.74 | 0.76 | 1.60 | Stem loop 2 | 6 |
| L2_e4_74 | 3958 | 2.49 | 1.52 | 0.80 | 1.60 | Stem loop 2 | 4 |
| L2_e5_67 | 4026 | 1.96 | 1.92 | 0.94 | 1.61 | Stem loop 2 | 5 |
| L2_e4_60 | 3944 | 2.37 | 1.61 | 0.85 | 1.61 | Stem loop 2 | 4 |
| L2_e5_35 | 3994 | 2.25 | 1.62 | 0.96 | 1.61 | Stem loop 2 | 5 |
| L2_e5_87 | 4046 | 2.03 | 2.08 | 0.71 | 1.61 | Stem loop 2 | 5 |
| L2_e5_69 | 4028 | 2.92 | 1.12 | 0.80 | 1.61 | Stem loop 2 | 5 |
| L2_e6_14 | 4073 | 2.30 | 1.80 | 0.74 | 1.61 | Stem loop 2 | 6 |
| L2_e6_50 | 4109 | 2.12 | 1.69 | 1.04 | 1.62 | Stem loop 2 | 6 |
| L2_e4_72 | 3956 | 2.46 | 1.56 | 0.83 | 1.62 | Stem loop 2 | 4 |
| L2_e5_77 | 4036 | 2.54 | 1.59 | 0.73 | 1.62 | Stem loop 2 | 5 |
| L2_e5_53 | 4012 | 2.32 | 1.75 | 0.79 | 1.62 | Stem loop 2 | 5 |
| L2_e6_87 | 4146 | 2.15 | 1.85 | 0.86 | 1.62 | Stem loop 2 | 6 |
| L2_e4_48 | 3932 | 1.86 | 2.13 | 0.87 | 1.62 | Stem loop 2 | 4 |
| L2_e7_21 | 4180 | 2.31 | 1.79 | 0.78 | 1.62 | Stem loop 2 | 7 |
| L2_e6_100 | 4159 | 2.33 | 1.79 | 0.75 | 1.62 | Stem loop 2 | 6 |
| L2_e4_15 | 3899 | 2.35 | 1.66 | 0.87 | 1.62 | Stem loop 2 | 4 |
| L2_e4_8 | 3892 | 2.42 | 1.86 | 0.60 | 1.63 | Stem loop 2 | 4 |
| L2_e3_20 | 3879 | 2.29 | 1.53 | 1.05 | 1.63 | Stem loop 2 | 3 |
| L2_e8_10 | 4244 | 2.43 | 1.47 | 0.98 | 1.63 | Stem loop 2 | 8 |
| L2_e4_75 | 3959 | 2.27 | 1.83 | 0.79 | 1.63 | Stem loop 2 | 4 |
| L2_e8_6 | 4240 | 2.38 | 1.93 | 0.58 | 1.63 | Stem loop 2 | 8 |
| L2_e6_45 | 4104 | 2.62 | 1.52 | 0.77 | 1.64 | Stem loop 2 | 6 |
| L2_e4_37 | 3921 | 2.40 | 1.69 | 0.82 | 1.64 | Stem loop 2 | 4 |
| L2_e6_58 | 4117 | 2.16 | 2.10 | 0.65 | 1.64 | Stem loop 2 | 6 |
| L2_e8_12 | 4246 | 2.18 | 2.04 | 0.70 | 1.64 | Stem loop 2 | 8 |
| L2_e3_14 | 3873 | 2.43 | 1.54 | 0.95 | 1.64 | Stem loop 2 | 3 |
| L2_e5_37 | 3996 | 2.42 | 1.75 | 0.76 | 1.64 | Stem loop 2 | 5 |
| L2_e6_35 | 4094 | 2.90 | 1.32 | 0.71 | 1.64 | Stem loop 2 | 6 |
| L2_e5_48 | 4007 | 2.92 | 1.29 | 0.73 | 1.64 | Stem loop 2 | 5 |
| L2_e5_31 | 3990 | 2.71 | 1.38 | 0.86 | 1.65 | Stem loop 2 | 5 |
| T_e3_13 | 4336 | 3.15 | 0.78 | 1.02 | 1.65 | Tetraloop | 3 |
| L2_e5_90 | 4049 | 2.64 | 1.62 | 0.70 | 1.65 | Stem loop 2 | 5 |
| L2_e7_73 | 4232 | 2.87 | 1.56 | 0.54 | 1.66 | Stem loop 2 | 7 |
| L2_e5_61 | 4020 | 2.68 | 1.26 | 1.03 | 1.66 | Stem loop 2 | 5 |
| L2_e5_59 | 4018 | 2.89 | 1.34 | 0.74 | 1.66 | Stem loop 2 | 5 |
| L2_e5_20 | 3979 | 2.26 | 1.81 | 0.90 | 1.66 | Stem loop 2 | 5 |
| L2_e4_27 | 3911 | 2.48 | 1.88 | 0.61 | 1.66 | Stem loop 2 | 4 |
| L2_e3_11 | 3870 | 2.12 | 1.99 | 0.89 | 1.66 | Stem loop 2 | 3 |
| L2_e6_32 | 4091 | 2.59 | 1.87 | 0.54 | 1.67 | Stem loop 2 | 6 |
| L2_e7_31 | 4190 | 2.43 | 1.69 | 0.89 | 1.67 | Stem loop 2 | 7 |
| L2_e7_63 | 4222 | 2.36 | 2.04 | 0.61 | 1.67 | Stem loop 2 | 7 |
| L2_e4_46 | 3930 | 2.64 | 1.40 | 0.97 | 1.67 | Stem loop 2 | 4 |
| L2_e5_57 | 4016 | 2.39 | 1.67 | 0.97 | 1.67 | Stem loop 2 | 5 |
| L2_e3_18 | 3877 | 2.52 | 1.52 | 0.98 | 1.68 | Stem loop 2 | 3 |
| L2_e5_88 | 4047 | 2.44 | 1.68 | 0.92 | 1.68 | Stem loop 2 | 5 |
| L2_e4_51 | 3935 | 2.74 | 1.49 | 0.82 | 1.68 | Stem loop 2 | 4 |
| L2_e4_69 | 3953 | 2.00 | 2.16 | 0.88 | 1.68 | Stem loop 2 | 4 |
| L2_e4_43 | 3927 | 2.16 | 2.07 | 0.82 | 1.68 | Stem loop 2 | 4 |
| L2_e4_2 | 3886 | 2.59 | 1.75 | 0.70 | 1.68 | Stem loop 2 | 4 |
| L2_e5_43 | 4002 | 2.77 | 1.68 | 0.60 | 1.69 | Stem loop 2 | 5 |
| L2_e8_4 | 4238 | 2.37 | 1.58 | 1.10 | 1.69 | Stem loop 2 | 8 |
| L2_e4_49 | 3933 | 2.42 | 1.74 | 0.91 | 1.69 | Stem loop 2 | 4 |
| L2_e3_24 | 3883 | 2.53 | 1.29 | 1.26 | 1.69 | Stem loop 2 | 3 |
| L2_e5_16 | 3975 | 2.94 | 1.56 | 0.58 | 1.69 | Stem loop 2 | 5 |
| L2_e7_28 | 4187 | 2.41 | 1.88 | 0.79 | 1.70 | Stem loop 2 | 7 |
| L2_e6_44 | 4103 | 2.78 | 1.52 | 0.78 | 1.70 | Stem loop 2 | 6 |
| L2_e7_55 | 4214 | 2.93 | 1.44 | 0.71 | 1.70 | Stem loop 2 | 7 |
| L2_e4_25 | 3909 | 2.25 | 1.86 | 0.98 | 1.70 | Stem loop 2 | 4 |
| L2_e6_46 | 4105 | 2.72 | 1.52 | 0.85 | 1.70 | Stem loop 2 | 6 |
| L2_e5_34 | 3993 | 2.38 | 1.88 | 0.83 | 1.70 | Stem loop 2 | 5 |
| L2_e5_62 | 4021 | 2.29 | 1.98 | 0.83 | 1.70 | Stem loop 2 | 5 |
| L2_e4_35 | 3919 | 1.74 | 2.40 | 0.97 | 1.70 | Stem loop 2 | 4 |
| L2_e4_39 | 3923 | 2.49 | 1.66 | 0.96 | 1.70 | Stem loop 2 | 4 |
| M4_GC | 4358 | 2.99 | 1.32 | 0.80 | 1.71 | none | 0 |
| L2_e7_54 | 4213 | 2.41 | 1.86 | 0.85 | 1.71 | Stem loop 2 | 7 |
| L2_e4_33 | 3917 | 2.73 | 1.62 | 0.78 | 1.71 | Stem loop 2 | 4 |
| L2_e4_41 | 3925 | 3.04 | 1.31 | 0.78 | 1.71 | Stem loop 2 | 4 |
| L2_e5_4 | 3963 | 2.95 | 1.40 | 0.78 | 1.71 | Stem loop 2 | 5 |
| L2_e8_18 | 4252 | 2.92 | 1.18 | 1.02 | 1.71 | Stem loop 2 | 8 |
| L2_e7_40 | 4199 | 2.71 | 1.62 | 0.81 | 1.71 | Stem loop 2 | 7 |
| L2_e3_5 | 3864 | 2.88 | 1.28 | 0.98 | 1.71 | Stem loop 2 | 3 |
| L2_e3_2 | 3861 | 2.70 | 1.85 | 0.60 | 1.72 | Stem loop 2 | 3 |
| L2_e3_15 | 3874 | 2.66 | 2.10 | 0.40 | 1.72 | Stem loop 2 | 3 |
| L2_e3_13 | 3872 | 2.17 | 2.32 | 0.67 | 1.72 | Stem loop 2 | 3 |
| L2_e5_17 | 3976 | 2.65 | 1.79 | 0.73 | 1.72 | Stem loop 2 | 5 |
| L2_e5_89 | 4048 | 2.87 | 1.64 | 0.65 | 1.72 | Stem loop 2 | 5 |
| L2_e8_7 | 4241 | 2.86 | 1.69 | 0.62 | 1.73 | Stem loop 2 | 8 |
| L2_e4_7 | 3891 | 2.37 | 1.92 | 0.89 | 1.73 | Stem loop 2 | 4 |
| T_e3_14 | 4337 | 3.22 | 1.13 | 0.84 | 1.73 | Tetraloop | 3 |
| T_e3_3 | 4326 | 3.39 | 0.91 | 0.90 | 1.73 | Tetraloop | 3 |
| L2_e4_68 | 3952 | 2.55 | 1.80 | 0.85 | 1.73 | Stem loop 2 | 4 |
| L2_e5_98 | 4057 | 2.25 | 2.04 | 0.92 | 1.74 | Stem loop 2 | 5 |
| L2_e4_26 | 3910 | 2.10 | 2.10 | 1.01 | 1.74 | Stem loop 2 | 4 |
| L2_e6_72 | 4131 | 2.95 | 1.59 | 0.68 | 1.74 | Stem loop 2 | 6 |
| L2_e4_40 | 3924 | 2.06 | 2.14 | 1.03 | 1.74 | Stem loop 2 | 4 |
| L2_e5_18 | 3977 | 2.95 | 1.36 | 0.92 | 1.74 | Stem loop 2 | 5 |
| L2_e6_53 | 4112 | 2.64 | 1.84 | 0.75 | 1.74 | Stem loop 2 | 6 |
| L2_e6_7 | 4066 | 1.88 | 2.40 | 0.95 | 1.75 | Stem loop 2 | 6 |
| L2_e5_71 | 4030 | 2.88 | 1.56 | 0.81 | 1.75 | Stem loop 2 | 5 |
| L2_e5_39 | 3998 | 2.61 | 1.86 | 0.79 | 1.75 | Stem loop 2 | 5 |
| L2_e6_36 | 4095 | 2.85 | 1.63 | 0.78 | 1.75 | Stem loop 2 | 6 |
| L2_e6_96 | 4155 | 2.66 | 1.71 | 0.89 | 1.75 | Stem loop 2 | 6 |
| L2_e6_22 | 4081 | 2.67 | 1.80 | 0.80 | 1.75 | Stem loop 2 | 6 |
| M4_CG | 4359 | 2.73 | 1.43 | 1.10 | 1.75 | none | 0 |
| L2_e4_13 | 3897 | 2.68 | 1.75 | 0.85 | 1.76 | Stem loop 2 | 4 |
| L2_e5_100 | 4059 | 2.21 | 2.20 | 0.87 | 1.76 | Stem loop 2 | 5 |
| T_e3_21 | 4344 | 3.36 | 0.96 | 0.94 | 1.76 | Tetraloop | 3 |
| L2_e5_97 | 4056 | 3.03 | 1.30 | 0.94 | 1.76 | Stem loop 2 | 5 |
| L2_e5_5 | 3964 | 2.87 | 1.51 | 0.89 | 1.76 | Stem loop 2 | 5 |
| L2_e6_91 | 4150 | 1.87 | 2.42 | 1.00 | 1.76 | Stem loop 2 | 6 |
| L2_e5_36 | 3995 | 2.54 | 1.50 | 1.24 | 1.76 | Stem loop 2 | 5 |
| L2_e6_57 | 4116 | 2.55 | 1.86 | 0.88 | 1.76 | Stem loop 2 | 6 |
| L2_e5_14 | 3973 | 2.99 | 1.61 | 0.70 | 1.77 | Stem loop 2 | 5 |
| L2_e3_21 | 3880 | 3.01 | 1.37 | 0.92 | 1.77 | Stem loop 2 | 3 |
| L2_e5_8 | 3967 | 2.37 | 2.03 | 0.91 | 1.77 | Stem loop 2 | 5 |
| L2_e6_10 | 4069 | 2.34 | 2.04 | 0.93 | 1.77 | Stem loop 2 | 6 |
| L2_e4_28 | 3912 | 3.14 | 1.40 | 0.78 | 1.78 | Stem loop 2 | 4 |
| T_e2_9 | 4300 | 3.33 | 1.11 | 0.90 | 1.78 | Tetraloop | 2 |
| L2_e4_50 | 3934 | 2.80 | 1.64 | 0.91 | 1.78 | Stem loop 2 | 4 |
| L2_e4_34 | 3918 | 2.63 | 2.12 | 0.60 | 1.79 | Stem loop 2 | 4 |
| L2_e6_77 | 4136 | 2.16 | 2.54 | 0.66 | 1.79 | Stem loop 2 | 6 |
| L2_e6_52 | 4111 | 2.48 | 1.99 | 0.89 | 1.79 | Stem loop 2 | 6 |
| L2_e4_44 | 3928 | 3.21 | 1.40 | 0.76 | 1.79 | Stem loop 2 | 4 |
| L2_e4_54 | 3938 | 3.32 | 1.27 | 0.79 | 1.79 | Stem loop 2 | 4 |
| L2_e5_27 | 3986 | 2.56 | 1.94 | 0.88 | 1.79 | Stem loop 2 | 5 |
| L2_e5_95 | 4054 | 2.57 | 1.99 | 0.83 | 1.80 | Stem loop 2 | 5 |
| L2_e4_67 | 3951 | 2.22 | 2.48 | 0.70 | 1.80 | Stem loop 2 | 4 |
| L2_e5_15 | 3974 | 2.54 | 1.90 | 0.96 | 1.80 | Stem loop 2 | 5 |
| L2_e5_7 | 3966 | 3.04 | 1.56 | 0.81 | 1.80 | Stem loop 2 | 5 |
| T_e1b_14 | 4281 | 3.51 | 1.04 | 0.86 | 1.80 | Tetraloop | 1 |
| L2_e5_22 | 3981 | 2.64 | 1.99 | 0.80 | 1.81 | Stem loop 2 | 5 |
| L2_e7_50 | 4209 | 2.90 | 1.60 | 0.93 | 1.81 | Stem loop 2 | 7 |
| L2_e7_49 | 4208 | 2.43 | 2.17 | 0.84 | 1.81 | Stem loop 2 | 7 |
| T_e1b_15 | 4282 | 3.23 | 1.54 | 0.67 | 1.81 | Tetraloop | 1 |
| L2_e5_60 | 4019 | 2.61 | 1.58 | 1.27 | 1.82 | Stem loop 2 | 5 |
| T_e2_7 | 4298 | 3.36 | 1.14 | 0.97 | 1.83 | Tetraloop | 2 |
| L2_e3_17 | 3876 | 2.84 | 1.80 | 0.84 | 1.83 | Stem loop 2 | 3 |
| L2_e4_55 | 3939 | 2.50 | 2.22 | 0.76 | 1.83 | Stem loop 2 | 4 |
| L2_e4_38 | 3922 | 2.15 | 2.46 | 0.87 | 1.83 | Stem loop 2 | 4 |
| L2_e5_30 | 3989 | 2.64 | 2.10 | 0.75 | 1.83 | Stem loop 2 | 5 |
| T_e1a_1 | 4260 | 3.52 | 1.32 | 0.67 | 1.83 | Tetraloop | 1 |
| L2_e5_2 | 3961 | 2.95 | 1.97 | 0.58 | 1.83 | Stem loop 2 | 5 |
| L2_e6_42 | 4101 | 2.96 | 1.71 | 0.86 | 1.84 | Stem loop 2 | 6 |
| L2_e6_34 | 4093 | 2.46 | 2.08 | 0.99 | 1.84 | Stem loop 2 | 6 |
| L2_e4_62 | 3946 | 2.83 | 1.85 | 0.85 | 1.84 | Stem loop 2 | 4 |
| L2_e4_53 | 3937 | 2.67 | 1.90 | 0.95 | 1.84 | Stem loop 2 | 4 |
| L2_e3_4 | 3863 | 2.55 | 2.18 | 0.80 | 1.84 | Stem loop 2 | 3 |
| L2_e3_7 | 3866 | 2.47 | 2.18 | 0.89 | 1.85 | Stem loop 2 | 3 |
| L2_e6_84 | 4143 | 3.11 | 1.86 | 0.57 | 1.85 | Stem loop 2 | 6 |
| L2_e4_36 | 3920 | 3.35 | 1.32 | 0.88 | 1.85 | Stem loop 2 | 4 |
| L2_e5_63 | 4022 | 2.29 | 2.28 | 0.99 | 1.85 | Stem loop 2 | 5 |
| T_e3_8 | 4331 | 3.06 | 1.44 | 1.06 | 1.85 | Tetraloop | 3 |
| flip_U46A | 4357 | 3.23 | 1.24 | 1.09 | 1.85 | none | 0 |
| T_e1b_6 | 4273 | 3.88 | 0.75 | 0.94 | 1.86 | Tetraloop | 1 |
| L2_e5_58 | 4017 | 2.77 | 1.87 | 0.93 | 1.86 | Stem loop 2 | 5 |
| L2_e4_4 | 3888 | 2.49 | 1.92 | 1.16 | 1.86 | Stem loop 2 | 4 |
| L2_e6_71 | 4130 | 2.50 | 2.08 | 1.00 | 1.86 | Stem loop 2 | 6 |
| L2_e3_8 | 3867 | 2.75 | 1.87 | 0.96 | 1.86 | Stem loop 2 | 3 |
| L2_e5_83 | 4042 | 2.73 | 2.03 | 0.83 | 1.86 | Stem loop 2 | 5 |
| L2_e6_86 | 4145 | 2.63 | 2.03 | 0.93 | 1.86 | Stem loop 2 | 6 |
| L2_e5_56 | 4015 | 2.88 | 1.89 | 0.82 | 1.86 | Stem loop 2 | 5 |
| T_e2_19 | 4310 | 3.55 | 1.13 | 0.92 | 1.86 | Tetraloop | 2 |
| L2_e5_12 | 3971 | 2.94 | 1.73 | 0.92 | 1.87 | Stem loop 2 | 5 |
| T_e3_17 | 4340 | 3.27 | 1.27 | 1.06 | 1.87 | Tetraloop | 3 |
| L2_e5_78 | 4037 | 3.11 | 1.82 | 0.67 | 1.87 | Stem loop 2 | 5 |
| L2_e6_60 | 4119 | 3.08 | 1.57 | 0.96 | 1.87 | Stem loop 2 | 6 |
| T_e3_12 | 4335 | 3.46 | 1.16 | 1.00 | 1.87 | Tetraloop | 3 |
| T_e2_17 | 4308 | 3.14 | 1.44 | 1.04 | 1.87 | Tetraloop | 2 |
| L2_e5_10 | 3969 | 2.81 | 1.82 | 0.98 | 1.87 | Stem loop 2 | 5 |
| T_e1a_8 | 4267 | 3.60 | 1.00 | 1.02 | 1.87 | Tetraloop | 1 |
| L2_e4_59 | 3943 | 2.75 | 2.04 | 0.83 | 1.87 | Stem loop 2 | 4 |
| L2_e4_23 | 3907 | 2.71 | 2.06 | 0.87 | 1.88 | Stem loop 2 | 4 |
| L2_e4_73 | 3957 | 2.81 | 1.76 | 1.08 | 1.89 | Stem loop 2 | 4 |
| L2_e4_1 | 3885 | 3.08 | 1.63 | 0.99 | 1.90 | Stem loop 2 | 4 |
| L2_e6_64 | 4123 | 3.04 | 1.67 | 0.99 | 1.90 | Stem loop 2 | 6 |
| L2_e4_32 | 3916 | 3.01 | 2.03 | 0.70 | 1.91 | Stem loop 2 | 4 |
| T_e2_16 | 4307 | 2.52 | 2.11 | 1.11 | 1.92 | Tetraloop | 2 |
| T_e3_4 | 4327 | 3.37 | 1.54 | 0.85 | 1.92 | Tetraloop | 3 |
| L2_e4_66 | 3950 | 2.82 | 2.17 | 0.77 | 1.92 | Stem loop 2 | 4 |
| L2_e4_5 | 3889 | 3.02 | 1.84 | 0.92 | 1.93 | Stem loop 2 | 4 |
| T_e3_2 | 4325 | 3.22 | 1.56 | 1.01 | 1.93 | Tetraloop | 3 |
| L2_e4_65 | 3949 | 2.84 | 1.92 | 1.02 | 1.93 | Stem loop 2 | 4 |
| L2_e4_21 | 3905 | 2.81 | 1.84 | 1.15 | 1.94 | Stem loop 2 | 4 |
| L2_e5_73 | 4032 | 3.23 | 1.89 | 0.70 | 1.94 | Stem loop 2 | 5 |
| T_e3_24 | 4347 | 3.31 | 1.54 | 0.97 | 1.94 | Tetraloop | 3 |
| L2_e5_64 | 4023 | 3.24 | 1.80 | 0.78 | 1.94 | Stem loop 2 | 5 |
| L2_e3_10 | 3869 | 3.44 | 1.47 | 0.91 | 1.94 | Stem loop 2 | 3 |
| L2_e3_22 | 3881 | 2.91 | 1.89 | 1.04 | 1.94 | Stem loop 2 | 3 |
| L2_e5_70 | 4029 | 2.61 | 2.39 | 0.84 | 1.95 | Stem loop 2 | 5 |
| L2_e5_11 | 3970 | 3.03 | 1.87 | 0.99 | 1.96 | Stem loop 2 | 5 |
| T_e2_27 | 4318 | 3.06 | 1.63 | 1.20 | 1.96 | Tetraloop | 2 |
| L2_e5_40 | 3999 | 2.53 | 2.31 | 1.09 | 1.98 | Stem loop 2 | 5 |
| M4 | 4353 | 3.32 | 1.47 | 1.14 | 1.98 | none | 0 |
| L2_e4_24 | 3908 | 3.14 | 1.93 | 0.87 | 1.98 | Stem loop 2 | 4 |
| L2_e5_76 | 4035 | 3.28 | 1.85 | 0.82 | 1.98 | Stem loop 2 | 5 |
| T_e3_22 | 4345 | 3.52 | 1.39 | 1.05 | 1.99 | Tetraloop | 3 |
| L2_e4_31 | 3915 | 3.22 | 1.78 | 0.97 | 1.99 | Stem loop 2 | 4 |
| T_e3_9 | 4332 | 3.73 | 1.37 | 0.87 | 1.99 | Tetraloop | 3 |
| T_e1b_20 | 4287 | 3.38 | 1.67 | 0.93 | 1.99 | Tetraloop | 1 |
| L2_e5_32 | 3991 | 3.19 | 1.95 | 0.85 | 1.99 | Stem loop 2 | 5 |
| L2_e3_3 | 3862 | 3.44 | 1.64 | 0.91 | 2.00 | Stem loop 2 | 3 |
| L2_e3_1 | 3860 | 2.79 | 2.18 | 1.02 | 2.00 | Stem loop 2 | 3 |
| T_e2_1 | 4292 | 3.97 | 1.21 | 0.81 | 2.00 | Tetraloop | 2 |
| T_e3_25 | 4348 | 3.59 | 1.73 | 0.72 | 2.01 | Tetraloop | 3 |
| T_e1b_9 | 4276 | 3.71 | 1.06 | 1.28 | 2.02 | Tetraloop | 1 |
| T_e2_18 | 4309 | 4.30 | 0.79 | 0.98 | 2.02 | Tetraloop | 2 |
| T_e2_10 | 4301 | 3.63 | 1.63 | 0.83 | 2.03 | Tetraloop | 2 |
| T_e1b_16 | 4283 | 3.40 | 1.81 | 0.94 | 2.05 | Tetraloop | 1 |
| T_e3_5 | 4328 | 3.46 | 1.77 | 0.93 | 2.05 | Tetraloop | 3 |
| T_e2_11 | 4302 | 3.98 | 1.17 | 1.05 | 2.07 | Tetraloop | 2 |
| T_e1b_11 | 4278 | 3.42 | 1.71 | 1.08 | 2.07 | Tetraloop | 1 |
| T_e2_5 | 4296 | 3.81 | 1.59 | 0.83 | 2.08 | Tetraloop | 2 |
| T_e1a_3 | 4262 | 3.62 | 1.57 | 1.04 | 2.08 | Tetraloop | 1 |
| T_e2_13 | 4304 | 3.91 | 1.51 | 0.84 | 2.08 | Tetraloop | 2 |
| T_e3_1 | 4324 | 4.06 | 1.24 | 0.96 | 2.09 | Tetraloop | 3 |
| T_e2_20 | 4311 | 3.73 | 1.56 | 0.97 | 2.09 | Tetraloop | 2 |
| T_e2_4 | 4295 | 4.07 | 1.36 | 0.82 | 2.09 | Tetraloop | 2 |
| T_e2_29 | 4320 | 4.15 | 1.14 | 0.97 | 2.09 | Tetraloop | 2 |
| T_e1b_24 | 4291 | 4.43 | 0.71 | 1.13 | 2.09 | Tetraloop | 1 |
| T_e1a_4 | 4263 | 4.00 | 1.26 | 1.01 | 2.09 | Tetraloop | 1 |
| T_e3_19 | 4342 | 4.32 | 1.24 | 0.71 | 2.09 | Tetraloop | 3 |
| T_e3_6 | 4329 | 3.48 | 1.73 | 1.08 | 2.10 | Tetraloop | 3 |
| T_e1a_7 | 4266 | 4.04 | 1.49 | 0.77 | 2.10 | Tetraloop | 1 |
| T_e1b_2 | 4269 | 3.61 | 1.66 | 1.06 | 2.11 | Tetraloop | 1 |
| T_e2_32 | 4323 | 4.01 | 1.44 | 0.89 | 2.11 | Tetraloop | 2 |
| T_e2_25 | 4316 | 4.03 | 1.43 | 0.89 | 2.12 | Tetraloop | 2 |
| sl2_flip | 4355 | 3.01 | 2.21 | 1.17 | 2.13 | Stem loop 2 | 0 |
| T_e1b_18 | 4285 | 4.39 | 1.22 | 0.80 | 2.14 | Tetraloop | 1 |
| T_e1b_7 | 4274 | 4.20 | 1.30 | 0.92 | 2.14 | Tetraloop | 1 |
| T_e2_24 | 4315 | 3.71 | 1.92 | 0.81 | 2.15 | Tetraloop | 2 |
| T_e1b_3 | 4270 | 4.13 | 1.34 | 0.98 | 2.15 | Tetraloop | 1 |
| T_e3_20 | 4343 | 4.12 | 1.47 | 0.87 | 2.15 | Tetraloop | 3 |
| T_e1a_2 | 4261 | 4.33 | 1.07 | 1.09 | 2.16 | Tetraloop | 1 |
| T_e3_18 | 4341 | 4.06 | 1.45 | 0.98 | 2.16 | Tetraloop | 3 |
| T_e3_16 | 4339 | 3.83 | 1.62 | 1.12 | 2.19 | Tetraloop | 3 |
| T_e2_15 | 4306 | 4.06 | 1.75 | 0.78 | 2.19 | Tetraloop | 2 |
| T_e3_11 | 4334 | 4.13 | 1.89 | 0.59 | 2.2 | Tetraloop | 3 |
| T_e1b_8 | 4275 | 4.33 | 1.54 | 0.76 | 2.2 | Tetraloop | 1 |
| T_e1a_6 | 4265 | 4.65 | 1.12 | 0.87 | 2.2 | Tetraloop | 1 |
| T_e3_10 | 4333 | 4.09 | 1.64 | 0.92 | 2.22 | Tetraloop | 3 |
| T_e2_22 | 4313 | 4.31 | 1.39 | 0.96 | 2.22 | Tetraloop | 2 |
| T_e1b_22 | 4289 | 3.81 | 1.92 | 0.93 | 2.22 | Tetraloop | 1 |
| T_e1b_21 | 4288 | 3.79 | 2.30 | 0.58 | 2.22 | Tetraloop | 1 |
| T_e2_2 | 4293 | 3.94 | 1.99 | 0.75 | 2.23 | Tetraloop | 2 |
| dnr6_flip | 4352 | 4.34 | 1.42 | 0.93 | 2.23 | Tetraloop | 1 |
| L2_e5_23 | 3982 | 2.82 | 2.86 | 1.04 | 2.24 | Stem loop 2 | 5 |
| L2_e3_6 | 3865 | 2.70 | 3.14 | 0.94 | 2.26 | Stem loop 2 | 3 |
| T_e2_6 | 4297 | 4.32 | 1.31 | 1.17 | 2.27 | Tetraloop | 2 |
| T_e2_14 | 4305 | 4.13 | 1.46 | 1.21 | 2.27 | Tetraloop | 2 |
| T_e1b_5 | 4272 | 4.21 | 1.53 | 1.08 | 2.28 | Tetraloop | 1 |
| T_e2_30 | 4321 | 4.49 | 1.59 | 0.77 | 2.28 | Tetraloop | 2 |
| T_e3_15 | 4338 | 4.00 | 1.91 | 0.93 | 2.28 | Tetraloop | 3 |
| T_e1b_1 | 4268 | 3.44 | 2.33 | 1.08 | 2.28 | Tetraloop | 1 |
| T_e1b_10 | 4277 | 4.26 | 1.74 | 0.88 | 2.29 | Tetraloop | 1 |
| T_e3_26 | 4349 | 4.28 | 1.73 | 0.89 | 2.30 | Tetraloop | 3 |
| T_e2_8 | 4299 | 4.28 | 1.57 | 1.04 | 2.30 | Tetraloop | 2 |
| T_e1b_17 | 4284 | 4.00 | 1.92 | 1.00 | 2.31 | Tetraloop | 1 |
| F + E | 4354 | 4.32 | 2.05 | 0.57 | 2.31 | Tetraloop | 5 |
| T_e2_3 | 4294 | 4.28 | 1.81 | 0.92 | 2.34 | Tetraloop | 2 |
| T_e2_28 | 4319 | 4.42 | 1.54 | 1.14 | 2.37 | Tetraloop | 2 |
| T_e2_31 | 4322 | 4.55 | 1.61 | 0.94 | 2.37 | Tetraloop | 2 |
| T_e1b_19 | 4286 | 4.13 | 1.74 | 1.25 | 2.37 | Tetraloop | 1 |
| T_e1b_23 | 4290 | 4.59 | 1.52 | 1.09 | 2.40 | Tetraloop | 1 |
| T_e3_23 | 4346 | 4.26 | 1.73 | 1.31 | 2.43 | Tetraloop | 3 |
| T_e1b_4 | 4271 | 4.62 | 1.63 | 1.16 | 2.47 | Tetraloop | 1 |
| T_e1a_5 | 4264 | 4.34 | 2.24 | 0.85 | 2.48 | Tetraloop | 1 |
| T_e2_26 | 4317 | 4.80 | 1.65 | 1.08 | 2.51 | Tetraloop | 2 |
| T_e3_7 | 4330 | 4.70 | 1.83 | 1.04 | 2.52 | Tetraloop | 3 |
| T_e2_21 | 4312 | 4.35 | 1.87 | 1.36 | 2.53 | Tetraloop | 2 |
| FE_sl2 | 4356 | 4.55 | 2.44 | 0.98 | 2.66 | Tetraloop | 5 |
| T_e1b_13 | 4280 | 5.20 | 2.29 | 0.99 | 2.83 | Tetraloop | 1 |

Table 16. Prime Editing Efficiency with PEgRNAs Having Modified gRNA Cores

[0456] Editing efficiency with PEgRNAs having a gRNA core sequence according to SEQ ID NO: 4452, which includes the “M4” substitution, a “s12_flip” modification (a A to G substitution at nucleotide 49, U to G substitution at nucleotide 51, A to C substitution at nucleotide 58, and U to C substitution at nucleotide 60 compared to SEQ ID NO: 16), and an extension in the tetraloop (replacement of nucleotides 11-12 with GGG and replacement of nucleotides 17-18 with UCC) was also tested. PEgRNA with various spacer, PBS, and editing template sequences were designed to target one of multiple loci in a human gene (referred to as target 4). Each PEgRNA contains, from 5′ to 3′, the spacer, a gRNA core, and an extension arm that includes an editing template and a PBS, where the gRNA core sequence is according to either SEQ ID NO: 4452 or the canonical SpCas9 gRNA core according to SEQ ID NO: 16. For each PEgRNA having the canonical SpCas9 gRNA core, a PEgRNA that contains the same spacer, the same extension arm, and a gRNA core according to SEQ ID NO: 4452 was designed; the two PEgRNAs are identical except for the gRNA core sequences. A total 381 PEgRNAs having the canonical SpCas9 gRNA core and 381 corresponding PEgRNAs having the gRNA core of SEQ ID NO: 4452 were assembled as described, and editing efficiency was examined in Example 1. Compared to PEgRNAs having the canonical SpCas9 gRNA core sequence, a 1.59 fold improvement of average editing efficiency was observed with PEgRNAs having the gRNA core sequence according to SEQ ID NO: 4452.

### INCORPORATION BY REFERENCE

[0457] All publications and patent applications mentioned herein are hereby incorporated by reference in their entirety as if each individual publication or patent application was specifically and individually indicated to be incorporated by reference. In case of conflict, the present application, including any definitions herein, will control.

### EQUIVALENTS

[0458] Those skilled in the art will recognize, or be able to ascertain using no more than routine experimentation, many equivalents to the specific embodiments of the methods and compositions provided herein. Such equivalents are intended to be encompassed by the following claims.

LENGTHY TABLES
The patent application contains a lengthy table section. A copy of the table is available in electronic form from the USPTO web site (https://seqdata.uspto.gov/?pageRequest=docDetail&DocID=US20250297246A1). An electronic copy of the table will also be available from the USPTO upon request and payment of the fee set forth in 37 CFR 1.19(b)(3).

1.-24. (canceled)

25. A prime editing guide RNA (PEgRNA) comprising:
(a) a spacer that comprises a region of complementarity to a search target sequence in target strand of a double stranded target DNA;
(b) an extension arm comprising:
(i) an editing template that comprises an intended edit compared to the double stranded target DNA, and
(ii) a primer binding site (PBS) that comprises a region of complementarity to a region upstream of a nick site in a non-target strand of the double stranded target DNA; and
(c) a guide RNA (gRNA) core comprising at least 80% identity to SEQ ID NO: 16 and containing one or more modifications relative to SEQ ID NO: 16, the one or more modifications comprising:
i. a first insertion between nucleotides 12 and 13 and a second insertion between nucleotides 16 and 17, wherein the first insertion is the reverse complement of the second insertion;
ii. a first insertion between nucleotides 52 and 53 and a second insertion between nucleotides 56 and 57, wherein the first insertion is the reverse complement of the second insertion;
iii. complementary substitutions of nucleotides 2 and 29, 3 and 28, 4 and 27, 51 and 58, or combinations thereof;
iv. replacement of nucleotides 11-12 with a replacement sequence 1 and replacement of nucleotides 17-18 with a replacement sequence 2, wherein the replacement sequences 1 is at least 3 nucleotides in length and wherein the replacement sequence 2 is the reverse compliment of replacement sequence 1;
v. a T to G or T to C substitution at nucleotide 5 and a complementary substitution at nucleotide 26; or
vi. any combination thereof.

26. The PEgRNA of claim 25, wherein the gRNA core comprises:
the first insertion between nucleotides 12 and 13, and the second insertion between nucleotides 16 and 17, wherein the first insertion is 1 to 6 nucleotides in length or 1 to 3 nucleotides in length.

27. (canceled)

28. The PEgRNA of claim 26, wherein the first insertion comprises the sequence UGCUG.

29-30. (canceled)

31. The PEgRNA of claim 26, wherein the first insertion comprises a sequence selected from the group consisting of C, CC, CA, CG, A, AC, AA, AG, CCC, CCAC, CCAAC, and CCACAC.

32. The PEgRNA of claim 25, wherein the gRNA core comprises the first insertion between nucleotides 52 and 53 and the second insertion between nucleotides 56 and 57, wherein the first insertion is 1 to 8 nucleotides in length.

33. (canceled)

34. The PEgRNA of claim 25, wherein the gRNA core comprises the complementary substitutions of nucleotides 2 and 29, 3 and 28, 4 and 27, 11 and 18, 12 and 17, 51 and 58, or combinations thereof.

35. The PEgRNA of claim 32, wherein the gRNA core comprises:
(i) a U to A substitution at nucleotide 2;
(ii) a U to A substitution at nucleotide 3; or
(iii) a U to A substitution at nucleotide 4.

36.-37. (canceled)

38. The PEgRNA of claim 34, wherein the gRNA core comprises a U to G substitution at nucleotide 51 and an A to C substitution at nucleotide 58.

39. The PEgRNA of claim 25, wherein the gRNA core comprises the replacement of nucleotides 11-12 with the replacement sequence 1 and the replacement of nucleotides 17-18 with the replacement sequence 2, wherein the replacement sequence 1 is 3 to 5 nucleotides in length, and wherein the replacement sequence 1 comprises a sequence selected from the group consisting of CAGC, CCGC, GGAC, UGC, UCC, GAGGC, AGC, GGC, CGCA, GCACA, GGUC, and GGG.

40.-41. (canceled)

42. The PEgRNA of claim 25, wherein the gRNA core further comprises a U to A substitution at nucleotide 5 and an A to U substitution at nucleotide 26.

43. The PEgRNA of claim 25, wherein the gRNA core comprises complementary substitutions at nucleotides 52 and 57.

44. The PEgRNA of claim 43, wherein the gRNA core comprises:
(i) a U to G substitution at nucleotide 52 and an A to C substitution at nucleotide 57; or
(ii) a U to C substitution at nucleotide 52 and an A to G substitution at nucleotide 57.

45. (canceled)

46. The PEgRNA of claim 25, wherein the gRNA core comprises complementary substitutions at nucleotides 49 and 60.

47. The PEgRNA of claim 46, wherein the gRNA core comprises an A to G substitution at nucleotide 49 and a U to C substitution at nucleotide 60.

48.-49. (canceled)

50. A prime editing guide RNA (PEgRNA) comprising:
(a) a spacer that comprises a region of complementarity to a search target sequence in target strand of a double stranded target DNA;
(b) an extension arm comprising:
(i) an editing template that comprises an intended edit compared to the double stranded target DNA, and
(ii) a primer binding site (PBS) that comprises a region of complementarity to a region upstream of a nick site in a non-target strand of the double stranded target DNA; and
(c) a guide RNA (gRNA) core comprising a sequence selected from the group consisting of SEQ ID NOs: 17-61, 3860-4253, 4255-4349, 4351-4359, and 4452.

51. The PEgRNA of claim 50, wherein the gRNA core comprises:
(i) a sequence selected from the group consisting of SEQ ID NOs: 4352, 3860, 3862, 3865, 3908, 3915, 3982, 3991, 4035, 4261, 4262, 4263, 4264, 4265, 4266, 4268, 4277, 4278, 4280, 4283, 4284, 4285, 4286, 4269, 4287, 4288, 4289, 4290, 4291, 4270, 4271, 4272, 4274, 4275, 4276, 4292, 4301, 4302, 4304, 4305, 4306, 4309, 4293, 4311, 4312, 4313, 4315, 4316, 4317, 4319, 4320, 4294, 4321, 4322, 4323, 4295, 4296, 4297, 4299, 4324, 4333, 4334, 4338, 4339, 4341, 4342, 4343, 4345, 4346, 4348, 4349, 4328, 4329, 4330, and 4332;
(ii) a sequence selected from the group consisting of SEQ ID NOs: 4294, 4319, 4322, 4286, 4290, 4346, 4271, 4264, 4317, 4330, 4312, 4356, 4280, and 4452; or
(iii) SEQ ID NO: 4354.

52.-100. (canceled)

101. A prime editing system comprising:
(a) the PEgRNA of claim 25 or one or more polynucleotides encoding the PEgRNA; and
(b) a prime editor comprising a Cas9 protein and a reverse transcriptase or one or more polynucleotides encoding the prime editor, wherein the Cas9 protein comprises a mutation in an HNH domain.

102.-111. (canceled)

112. The prime editing system of claim 101, comprising one or more AAV vectors that comprises the one or more polynucleotides encoding the PEgRNA and the one or more polynucleotides encoding the prime editor, wherein the one or more polynucleotides encoding the prime editor comprise (a) a first sequence encoding an N-terminal portion of the Cas protein and an intein-N and (b) a second sequence encoding an intein-C, a C-terminal portion of the Cas protein and the DNA polymerase.

113.-115. (canceled)

116. A lipid nanoparticle (LNP) or ribonucleoprotein (RNP) comprising the prime editing system of claim 101.

117. A method for editing a double stranded target DNA, the method comprising contacting the target DNA with the PEgRNA of claim 25 and a prime editor comprising a Cas9 nickase and a reverse transcriptase.

118.-120. (canceled)

The application's sequence listing, which the Patent Office published only in electronic form, follows.

SEQUENCE LISTING (7071 sequences)

SEQ ID NO: 1 - RNA, 22 nt, synthetic construct
  source 1..22: mol_type = other RNA
cgggtctctacgtgggggcccg

SEQ ID NO: 2 - RNA, 22 nt, synthetic construct
  source 1..22: mol_type = other RNA
cgcgtctctacgtgggggcgcg

SEQ ID NO: 3 - RNA, 14 nt, synthetic construct
  source 1..14: mol_type = other RNA
ggcgcgaaagcgcc

SEQ ID NO: 4 - RNA, 22 nt, synthetic construct
  source 1..22: mol_type = other RNA
gcggcaccgtccgcccaaacgg

SEQ ID NO: 5 - RNA, 18 nt, synthetic construct
  source 1..18: mol_type = other RNA
gcccggcgaaagccgggc

SEQ ID NO: 6 - RNA, 18 nt, synthetic construct
  source 1..18: mol_type = other RNA
gcccggcttcggccgggc

SEQ ID NO: 7 - RNA, 14 nt, synthetic construct
  source 1..14: mol_type = other RNA
ggcgcttcggcgcc

SEQ ID NO: 8 - RNA, 33 nt, synthetic construct
  source 1..33: mol_type = other RNA
ttaccacgcgctcttaactgctagcgccatggc

SEQ ID NO: 9 - RNA, 19 nt, synthetic construct
  source 1..19: mol_type = other RNA
acatgaggatcacccatgt

SEQ ID NO: 10 - RNA, 18 nt, synthetic construct
  source 1..18: mol_type = other RNA
gggcgggccgggggcggg

SEQ ID NO: 11 - RNA, 18 nt, synthetic construct
  source 1..18: mol_type = other RNA
ccccgccccggccgcccc

SEQ ID NO: 12 - RNA, 61 nt, synthetic construct
  source 1..61: mol_type = other RNA
gctcctctgattgactacccgtcagcgggggtcttttgggggctcgtccgggatcgggagt

SEQ ID NO: 13 - RNA, 61 nt, synthetic construct
  source 1..61: mol_type = other RNA
actcccgatcccggacgagcccccaaaagacccccgctgacgggtagtcaatcagaggagc

SEQ ID NO: 14 - RNA, 18 nt, synthetic construct
  source 1..18: mol_type = other RNA
tgggggctcgtccgggat

SEQ ID NO: 15 - RNA, 18 nt, synthetic construct
  source 1..18: mol_type = other RNA
atcccggacgagccccca

SEQ ID NO: 16 - RNA, 76 nt, synthetic construct
  source 1..76: mol_type = other RNA
gttttagagctagaaatagcaagttaaaataaggctagtccgttatcaacttgaaaaagtggcaccgagtcggtgc

SEQ ID NO: 17 - RNA, 76 nt, synthetic construct
  source 1..76: mol_type = other RNA
gatttagagctagaaatagcaagttaaattaaggctagtccgttatcaacttgaaaaagtggcaccgagtcggtgc

SEQ ID NO: 18 - RNA, 76 nt, synthetic construct
  source 1..76: mol_type = other RNA
gtattagagctagaaatagcaagttaatataaggctagtccgttatcaacttgaaaaagtggcaccgagtcggtgc

SEQ ID NO: 19 - RNA, 76 nt, synthetic construct
  source 1..76: mol_type = other RNA
gttatagagctagaaatagcaagttataataaggctagtccgttatcaacttgaaaaagtggcaccgagtcggtgc

SEQ ID NO: 20 - RNA, 76 nt, synthetic construct
  source 1..76: mol_type = other RNA
gtttaagagctagaaatagcaagtttaaataaggctagtccgttatcaacttgaaaaagtggcaccgagtcggtgc

SEQ ID NO: 21 - RNA, 76 nt, synthetic construct
  source 1..76: mol_type = other RNA
gttttagagctagaaatagcaagttaaaataaggctagtccgttatcaactggaaacagtggcaccgagtcggtgc

SEQ ID NO: 22 - RNA, 76 nt, synthetic construct
  source 1..76: mol_type = other RNA
gttttagagctagaaatagcaagttaaaataaggctagtccgttatcaactcgaaagagtggcaccgagtcggtgc

SEQ ID NO: 23 - RNA, 86 nt, synthetic construct
  source 1..86: mol_type = other RNA
gttttagagctatgctggaaacagcatagcaagttaaaataaggctagtccgttatcaacttgaaaaagtggcaccgagtcggtgc

SEQ ID NO: 24 - RNA, 86 nt, synthetic construct
  source 1..86: mol_type = other RNA
gtttaagagctatgctggaaacagcatagcaagtttaaataaggctagtccgttatcaacttgaaaaagtggcaccgagtcggtgc

SEQ ID NO: 25 - RNA, 76 nt, synthetic construct
  source 1..76: mol_type = other RNA
gtttaagagctagaaatagcaagtttaaataaggctagtccgttatcagcgtgaaaacgcggcaccgagtcggtgc

SEQ ID NO: 26 - RNA, 78 nt, synthetic construct
  source 1..78: mol_type = other RNA
gtttaagagctacgaaagtagcaagtttaaataaggctagtccgttatcaacttgaaaaagtggcaccgagtcggtgc

SEQ ID NO: 27 - RNA, 80 nt, synthetic construct
  source 1..80: mol_type = other RNA
gtttaagagctaccgaaaggtagcaagtttaaataaggctagtccgttatcaacttgaaaaagtggcaccgagtcggtgc

SEQ ID NO: 28 - RNA, 80 nt, synthetic construct
  source 1..80: mol_type = other RNA
gtttaagagctacagaaatgtagcaagtttaaataaggctagtccgttatcaacttgaaaaagtggcaccgagtcggtgc

SEQ ID NO: 29 - RNA, 80 nt, synthetic construct
  source 1..80: mol_type = other RNA
gtttaagagctacggaaatgtagcaagtttaaataaggctagtccgttatcaacttgaaaaagtggcaccgagtcggtgc

SEQ ID NO: 30 - RNA, 78 nt, synthetic construct
  source 1..78: mol_type = other RNA
gtttaagagctaagaaattagcaagtttaaataaggctagtccgttatcaacttgaaaaagtggcaccgagtcggtgc

SEQ ID NO: 31 - RNA, 80 nt, synthetic construct
  source 1..80: mol_type = other RNA
gtttaagagctaacgaaagttagcaagtttaaataaggctagtccgttatcaacttgaaaaagtggcaccgagtcggtgc

SEQ ID NO: 32 - RNA, 80 nt, synthetic construct
  source 1..80: mol_type = other RNA
gtttaagagctaaagaaatttagcaagtttaaataaggctagtccgttatcaacttgaaaaagtggcaccgagtcggtgc

SEQ ID NO: 33 - RNA, 80 nt, synthetic construct
  source 1..80: mol_type = other RNA
gtttaagagctaaggaaatttagcaagtttaaataaggctagtccgttatcaacttgaaaaagtggcaccgagtcggtgc

SEQ ID NO: 34 - RNA, 82 nt, synthetic construct
  source 1..82: mol_type = other RNA
gtttaagagctacccgaaagggtagcaagtttaaataaggctagtccgttatcaacttgaaaaagtggcaccgagtcggtgc

SEQ ID NO: 35 - RNA, 84 nt, synthetic construct
  source 1..84: mol_type = other RNA
gtttaagagctaccacgaaagtggtagcaagtttaaataaggctagtccgttatcaacttgaaaaagtggcaccgagtcggtgc

SEQ ID NO: 36 - RNA, 86 nt, synthetic construct
  source 1..86: mol_type = other RNA
gtttaagagctaccaacgaaagttggtagcaagtttaaataaggctagtccgttatcaacttgaaaaagtggcaccgagtcggtgc

SEQ ID NO: 37 - RNA, 88 nt, synthetic construct
  source 1..88: mol_type = other RNA
gtttaagagctaccacacgaaagtgtggtagcaagtttaaataaggctagtccgttatcaacttgaaaaagtggcaccgagtcggtgc

SEQ ID NO: 38 - RNA, 78 nt, synthetic construct
  source 1..78: mol_type = other RNA
gtttaagagctagaaatagcaagtttaaataaggctagtccgttatcaacttcgaaagaagtggcaccgagtcggtgc

SEQ ID NO: 39 - RNA, 80 nt, synthetic construct
  source 1..80: mol_type = other RNA
gtttaagagctagaaatagcaagtttaaataaggctagtccgttatcaacttccgaaaggaagtggcaccgagtcggtgc

SEQ ID NO: 40 - RNA, 80 nt, synthetic construct
  source 1..80: mol_type = other RNA
gtttaagagctagaaatagcaagtttaaataaggctagtccgttatcaacttcagaaatgaagtggcaccgagtcggtgc

SEQ ID NO: 41 - RNA, 80 nt, synthetic construct
  source 1..80: mol_type = other RNA
gtttaagagctagaaatagcaagtttaaataaggctagtccgttatcaacttcggaaatgaagtggcaccgagtcggtgc

SEQ ID NO: 42 - RNA, 78 nt, synthetic construct
  source 1..78: mol_type = other RNA
gtttaagagctagaaatagcaagtttaaataaggctagtccgttatcaacttagaaataagtggcaccgagtcggtgc

SEQ ID NO: 43 - RNA, 80 nt, synthetic construct
  source 1..80: mol_type = other RNA
gtttaagagctagaaatagcaagtttaaataaggctagtccgttatcaacttacgaaagtaagtggcaccgagtcggtgc

SEQ ID NO: 44 - RNA, 80 nt, synthetic construct
  source 1..80: mol_type = other RNA
gtttaagagctagaaatagcaagtttaaataaggctagtccgttatcaacttaagaaattaagtggcaccgagtcggtgc

SEQ ID NO: 45 - RNA, 80 nt, synthetic construct
  source 1..80: mol_type = other RNA
gtttaagagctagaaatagcaagtttaaataaggctagtccgttatcaacttaggaaattaagtggcaccgagtcggtgc

SEQ ID NO: 46 - RNA, 82 nt, synthetic construct
  source 1..82: mol_type = other RNA
gtttaagagctagaaatagcaagtttaaataaggctagtccgttatcaacttcccgaaagggaagtggcaccgagtcggtgc

SEQ ID NO: 47 - RNA, 84 nt, synthetic construct
  source 1..84: mol_type = other RNA
gtttaagagctagaaatagcaagtttaaataaggctagtccgttatcaacttccacgaaagtggaagtggcaccgagtcggtgc

SEQ ID NO: 48 - RNA, 86 nt, synthetic construct
  source 1..86: mol_type = other RNA
gtttaagagctagaaatagcaagtttaaataaggctagtccgttatcaacttccaacgaaagttggaagtggcaccgagtcggtgc

SEQ ID NO: 49 - RNA, 88 nt, synthetic construct
  source 1..88: mol_type = other RNA
gtttaagagctagaaatagcaagtttaaataaggctagtccgttatcaacttccacacgaaagtgtggaagtggcaccgagtcggtgc

SEQ ID NO: 50 - RNA, 78 nt, synthetic construct
  source 1..78: mol_type = other RNA
gtttaagagctagaaatagcaagtttaaataaggctagtccgttatcaacttgaaaaagtggcaccgcagtgcggtgc

SEQ ID NO: 51 - RNA, 80 nt, synthetic construct
  source 1..80: mol_type = other RNA
gtttaagagctagaaatagcaagtttaaataaggctagtccgttatcaacttgaaaaagtggcaccgccagtggcggtgc

SEQ ID NO: 52 - RNA, 80 nt, synthetic construct
  source 1..80: mol_type = other RNA
gtttaagagctagaaatagcaagtttaaataaggctagtccgttatcaacttgaaaaagtggcaccgcaagttgcggtgc

SEQ ID NO: 53 - RNA, 80 nt, synthetic construct
  source 1..80: mol_type = other RNA
gtttaagagctagaaatagcaagtttaaataaggctagtccgttatcaacttgaaaaagtggcaccgcgagttgcggtgc

SEQ ID NO: 54 - RNA, 78 nt, synthetic construct
  source 1..78: mol_type = other RNA
gtttaagagctagaaatagcaagtttaaataaggctagtccgttatcaacttgaaaaagtggcaccgaagttcggtgc

SEQ ID NO: 55 - RNA, 80 nt, synthetic construct
  source 1..80: mol_type = other RNA
gtttaagagctagaaatagcaagtttaaataaggctagtccgttatcaacttgaaaaagtggcaccgacagtgtcggtgc

SEQ ID NO: 56 - RNA, 80 nt, synthetic construct
  source 1..80: mol_type = other RNA
gtttaagagctagaaatagcaagtttaaataaggctagtccgttatcaacttgaaaaagtggcaccgaaagtttcggtgc

SEQ ID NO: 57 - RNA, 80 nt, synthetic construct
  source 1..80: mol_type = other RNA
gtttaagagctagaaatagcaagtttaaataaggctagtccgttatcaacttgaaaaagtggcaccgagagtttcggtgc

SEQ ID NO: 58 - RNA, 82 nt, synthetic construct
  source 1..82: mol_type = other RNA
gtttaagagctagaaatagcaagtttaaataaggctagtccgttatcaacttgaaaaagtggcaccgcccagtgggcggtgc

SEQ ID NO: 59 - RNA, 84 nt, synthetic construct
  source 1..84: mol_type = other RNA
gtttaagagctagaaatagcaagtttaaataaggctagtccgttatcaacttgaaaaagtggcaccgccacagtgtggcggtgc

SEQ ID NO: 60 - RNA, 86 nt, synthetic construct
  source 1..86: mol_type = other RNA
gtttaagagctagaaatagcaagtttaaataaggctagtccgttatcaacttgaaaaagtggcaccgccaacagtgttggcggtgc

SEQ ID NO: 61 - RNA, 88 nt, synthetic construct
  source 1..88: mol_type = other RNA
gtttaagagctagaaatagcaagtttaaataaggctagtccgttatcaacttgaaaaagtggcaccgccacacagtgtgtggcggtgc

SEQ ID NO: 62-3859 - skipped (3798 entries)

SEQ ID NO: 3860 - RNA, 82 nt, synthetic construct
  source 1..82: mol_type = other RNA
gtttaagagctagaaatagcaagtttaaataaggctagtccgttatcagcgtctcgaaagagacgcggcaccgagtcggtgc

SEQ ID NO: 3861 - RNA, 82 nt, synthetic construct
  source 1..82: mol_type = other RNA
gtttaagagctagaaatagcaagtttaaataaggctagtccgttatcagcgtgcagaaatgcacgcggcaccgagtcggtgc

SEQ ID NO: 3862 - RNA, 82 nt, synthetic construct
  source 1..82: mol_type = other RNA
gtttaagagctagaaatagcaagtttaaataaggctagtccgttatcagcgtcccgaaagggacgcggcaccgagtcggtgc

SEQ ID NO: 3863 - RNA, 82 nt, synthetic construct
  source 1..82: mol_type = other RNA
gtttaagagctagaaatagcaagtttaaataaggctagtccgttatcagcgttgcgaaagcaacgcggcaccgagtcggtgc

SEQ ID NO: 3864 - RNA, 82 nt, synthetic construct
  source 1..82: mol_type = other RNA
gtttaagagctagaaatagcaagtttaaataaggctagtccgttatcagcgtcacgaaagtgacgcggcaccgagtcggtgc

SEQ ID NO: 3865 - RNA, 82 nt, synthetic construct
  source 1..82: mol_type = other RNA
gtttaagagctagaaatagcaagtttaaataaggctagtccgttatcagcgtccagaaatggacgcggcaccgagtcggtgc

SEQ ID NO: 3866 - RNA, 82 nt, synthetic construct
  source 1..82: mol_type = other RNA
gtttaagagctagaaatagcaagtttaaataaggctagtccgttatcagcgtgctgaaaagcacgcggcaccgagtcggtgc

SEQ ID NO: 3867 - RNA, 82 nt, synthetic construct
  source 1..82: mol_type = other RNA
gtttaagagctagaaatagcaagtttaaataaggctagtccgttatcagcgtgtcgaaaggcacgcggcaccgagtcggtgc

SEQ ID NO: 3868 - RNA, 82 nt, synthetic construct
  source 1..82: mol_type = other RNA
gtttaagagctagaaatagcaagtttaaataaggctagtccgttatcagcgtcgggaaaccgacgcggcaccgagtcggtgc

SEQ ID NO: 3869 - RNA, 82 nt, synthetic construct
  source 1..82: mol_type = other RNA
gtttaagagctagaaatagcaagtttaaataaggctagtccgttatcagcgtcaggaaactgacgcggcaccgagtcggtgc

SEQ ID NO: 3870 - RNA, 82 nt, synthetic construct
  source 1..82: mol_type = other RNA
gtttaagagctagaaatagcaagtttaaataaggctagtccgttatcagcgttccgaaaggaacgcggcaccgagtcggtgc

SEQ ID NO: 3871 - RNA, 82 nt, synthetic construct
  source 1..82: mol_type = other RNA
gtttaagagctagaaatagcaagtttaaataaggctagtccgttatcagcgtggggaaacccacgcggcaccgagtcggtgc

SEQ ID NO: 3872 - RNA, 82 nt, synthetic construct
  source 1..82: mol_type = other RNA
gtttaagagctagaaatagcaagtttaaataaggctagtccgttatcagcgtagcgaaagctacgcggcaccgagtcggtgc

SEQ ID NO: 3873 - RNA, 82 nt, synthetic construct
  source 1..82: mol_type = other RNA
gtttaagagctagaaatagcaagtttaaataaggctagtccgttatcagcgtgtggaaacacacgcggcaccgagtcggtgc

SEQ ID NO: 3874 - RNA, 82 nt, synthetic construct
  source 1..82: mol_type = other RNA
gtttaagagctagaaatagcaagtttaaataaggctagtccgttatcagcgtgccgaaaggcacgcggcaccgagtcggtgc

SEQ ID NO: 3875 - RNA, 82 nt, synthetic construct
  source 1..82: mol_type = other RNA
gtttaagagctagaaatagcaagtttaaataaggctagtccgttatcagcgtcgtgaaaacgacgcggcaccgagtcggtgc

SEQ ID NO: 3876 - RNA, 82 nt, synthetic construct
  source 1..82: mol_type = other RNA
gtttaagagctagaaatagcaagtttaaataaggctagtccgttatcagcgtaccgaaaggtacgcggcaccgagtcggtgc

SEQ ID NO: 3877 - RNA, 82 nt, synthetic construct
  source 1..82: mol_type = other RNA
gtttaagagctagaaatagcaagtttaaataaggctagtccgttatcagcgtcctgaaaaggacgcggcaccgagtcggtgc

SEQ ID NO: 3878 - RNA, 82 nt, synthetic construct
  source 1..82: mol_type = other RNA
gtttaagagctagaaatagcaagtttaaataaggctagtccgttatcagcgtccggaaacggacgcggcaccgagtcggtgc

SEQ ID NO: 3879 - RNA, 82 nt, synthetic construct
  source 1..82: mol_type = other RNA
gtttaagagctagaaatagcaagtttaaataaggctagtccgttatcagcgtacggaaacgtacgcggcaccgagtcggtgc

SEQ ID NO: 3880 - RNA, 82 nt, synthetic construct
  source 1..82: mol_type = other RNA
gtttaagagctagaaatagcaagtttaaataaggctagtccgttatcagcgtgcggaaacgcacgcggcaccgagtcggtgc

SEQ ID NO: 3881 - RNA, 82 nt, synthetic construct
  source 1..82: mol_type = other RNA
gtttaagagctagaaatagcaagtttaaataaggctagtccgttatcagcgtctggaaacagacgcggcaccgagtcggtgc

SEQ ID NO: 3882 - RNA, 82 nt, synthetic construct
  source 1..82: mol_type = other RNA
gtttaagagctagaaatagcaagtttaaataaggctagtccgttatcagcgtggggaaactcacgcggcaccgagtcggtgc

SEQ ID NO: 3883 - RNA, 82 nt, synthetic construct
  source 1..82: mol_type = other RNA
gtttaagagctagaaatagcaagtttaaataaggctagtccgttatcagcgtccggaaatggacgcggcaccgagtcggtgc

SEQ ID NO: 3884 - RNA, 82 nt, synthetic construct
  source 1..82: mol_type = other RNA
gtttaagagctagaaatagcaagtttaaataaggctagtccgttatcagcgtcgtgaaagcgacgcggcaccgagtcggtgc

SEQ ID NO: 3885 - RNA, 84 nt, synthetic construct
  source 1..84: mol_type = other RNA
gtttaagagctagaaatagcaagtttaaataaggctagtccgttatcagcgttgtggaaacacaacgcggcaccgagtcggtgc

SEQ ID NO: 3886 - RNA, 84 nt, synthetic construct
  source 1..84: mol_type = other RNA
gtttaagagctagaaatagcaagtttaaataaggctagtccgttatcagcgtacaggaaactgtacgcggcaccgagtcggtgc

SEQ ID NO: 3887 - RNA, 84 nt, synthetic construct
  source 1..84: mol_type = other RNA
gtttaagagctagaaatagcaagtttaaataaggctagtccgttatcagcgtcgaagaaattcgacgcggcaccgagtcggtgc

SEQ ID NO: 3888 - RNA, 84 nt, synthetic construct
  source 1..84: mol_type = other RNA
gtttaagagctagaaatagcaagtttaaataaggctagtccgttatcagcgttaccgaaaggtaacgcggcaccgagtcggtgc

SEQ ID NO: 3889 - RNA, 84 nt, synthetic construct
  source 1..84: mol_type = other RNA
gtttaagagctagaaatagcaagtttaaataaggctagtccgttatcagcgtgccggaaacggcacgcggcaccgagtcggtgc

SEQ ID NO: 3890 - RNA, 84 nt, synthetic construct
  source 1..84: mol_type = other RNA
gtttaagagctagaaatagcaagtttaaataaggctagtccgttatcagcgtcaacgaaagttgacgcggcaccgagtcggtgc

SEQ ID NO: 3891 - RNA, 84 nt, synthetic construct
  source 1..84: mol_type = other RNA
gtttaagagctagaaatagcaagtttaaataaggctagtccgttatcagcgttggcgaaagctaacgcggcaccgagtcggtgc

SEQ ID NO: 3892 - RNA, 84 nt, synthetic construct
  source 1..84: mol_type = other RNA
gtttaagagctagaaatagcaagtttaaataaggctagtccgttatcagcgttagcgaaagctaacgcggcaccgagtcggtgc

SEQ ID NO: 3893 - RNA, 84 nt, synthetic construct
  source 1..84: mol_type = other RNA
gtttaagagctagaaatagcaagtttaaataaggctagtccgttatcagcgtggtcgaaagaccacgcggcaccgagtcggtgc

SEQ ID NO: 3894 - RNA, 84 nt, synthetic construct
  source 1..84: mol_type = other RNA
gtttaagagctagaaatagcaagtttaaataaggctagtccgttatcagcgtacgcgaaagcgtacgcggcaccgagtcggtgc

SEQ ID NO: 3895 - RNA, 84 nt, synthetic construct
  source 1..84: mol_type = other RNA
gtttaagagctagaaatagcaagtttaaataaggctagtccgttatcagcgtggtggaaacatcacgcggcaccgagtcggtgc

SEQ ID NO: 3896 - RNA, 84 nt, synthetic construct
  source 1..84: mol_type = other RNA
gtttaagagctagaaatagcaagtttaaataaggctagtccgttatcagcgtcgtggaaacacgacgcggcaccgagtcggtgc

SEQ ID NO: 3897 - RNA, 84 nt, synthetic construct
  source 1..84: mol_type = other RNA
gtttaagagctagaaatagcaagtttaaataaggctagtccgttatcagcgtgactgaaaagtcacgcggcaccgagtcggtgc

SEQ ID NO: 3898 - RNA, 84 nt, synthetic construct
  source 1..84: mol_type = other RNA
gtttaagagctagaaatagcaagtttaaataaggctagtccgttatcagcgtagcagaaatgctacgcggcaccgagtcggtgc

SEQ ID NO: 3899 - RNA, 84 nt, synthetic construct
  source 1..84: mol_type = other RNA
gtttaagagctagaaatagcaagtttaaataaggctagtccgttatcagcgtttgcgaaagcagacgcggcaccgagtcggtgc

SEQ ID NO: 3900 - RNA, 84 nt, synthetic construct
  source 1..84: mol_type = other RNA
gtttaagagctagaaatagcaagtttaaataaggctagtccgttatcagcgtcttcgaaagaggacgcggcaccgagtcggtgc

SEQ ID NO: 3901 - RNA, 84 nt, synthetic construct
  source 1..84: mol_type = other RNA
gtttaagagctagaaatagcaagtttaaataaggctagtccgttatcagcgtcggggaaacctgacgcggcaccgagtcggtgc

SEQ ID NO: 3902 - RNA, 84 nt, synthetic construct
  source 1..84: mol_type = other RNA
gtttaagagctagaaatagcaagtttaaataaggctagtccgttatcagcgtagcggaaacgctacgcggcaccgagtcggtgc

SEQ ID NO: 3903 - RNA, 84 nt, synthetic construct
  source 1..84: mol_type = other RNA
gtttaagagctagaaatagcaagtttaaataaggctagtccgttatcagcgtcaccgaaaggtgacgcggcaccgagtcggtgc

SEQ ID NO: 3904 - RNA, 84 nt, synthetic construct
  source 1..84: mol_type = other RNA
gtttaagagctagaaatagcaagtttaaataaggctagtccgttatcagcgtggcggaaacgccacgcggcaccgagtcggtgc

SEQ ID NO: 3905 - RNA, 84 nt, synthetic construct
  source 1..84: mol_type = other RNA
gtttaagagctagaaatagcaagtttaaataaggctagtccgttatcagcgtctacgaaagtagacgcggcaccgagtcggtgc

SEQ ID NO: 3906 - RNA, 84 nt, synthetic construct
  source 1..84: mol_type = other RNA
gtttaagagctagaaatagcaagtttaaataaggctagtccgttatcagcgtgcctgaaaaggcacgcggcaccgagtcggtgc

SEQ ID NO: 3907 - RNA, 84 nt, synthetic construct
  source 1..84: mol_type = other RNA
gtttaagagctagaaatagcaagtttaaataaggctagtccgttatcagcgtgtgcgaaagcacacgcggcaccgagtcggtgc

SEQ ID NO: 3908 - RNA, 84 nt, synthetic construct
  source 1..84: mol_type = other RNA
gtttaagagctagaaatagcaagtttaaataaggctagtccgttatcagcgtgtgagaaatcacacgcggcaccgagtcggtgc

SEQ ID NO: 3909 - RNA, 84 nt, synthetic construct
  source 1..84: mol_type = other RNA
gtttaagagctagaaatagcaagtttaaataaggctagtccgttatcagcgtgcaggaaactgcacgcggcaccgagtcggtgc

SEQ ID NO: 3910 - RNA, 84 nt, synthetic construct
  source 1..84: mol_type = other RNA
gtttaagagctagaaatagcaagtttaaataaggctagtccgttatcagcgttctcgaaagagaacgcggcaccgagtcggtgc

SEQ ID NO: 3911 - RNA, 84 nt, synthetic construct
  source 1..84: mol_type = other RNA
gtttaagagctagaaatagcaagtttaaataaggctagtccgttatcagcgtgcccgaaagggcacgcggcaccgagtcggtgc

SEQ ID NO: 3912 - RNA, 84 nt, synthetic construct
  source 1..84: mol_type = other RNA
gtttaagagctagaaatagcaagtttaaataaggctagtccgttatcagcgtaaccgaaaggttacgcggcaccgagtcggtgc

SEQ ID NO: 3913 - RNA, 84 nt, synthetic construct
  source 1..84: mol_type = other RNA
gtttaagagctagaaatagcaagtttaaataaggctagtccgttatcagcgtactggaaacagtacgcggcaccgagtcggtgc

SEQ ID NO: 3914 - RNA, 84 nt, synthetic construct
  source 1..84: mol_type = other RNA
gtttaagagctagaaatagcaagtttaaataaggctagtccgttatcagcgtcggcgaaagccgacgcggcaccgagtcggtgc

SEQ ID NO: 3915 - RNA, 84 nt, synthetic construct
  source 1..84: mol_type = other RNA
gtttaagagctagaaatagcaagtttaaataaggctagtccgttatcagcgtagccgaaaggctacgcggcaccgagtcggtgc

SEQ ID NO: 3916 - RNA, 84 nt, synthetic construct
  source 1..84: mol_type = other RNA
gtttaagagctagaaatagcaagtttaaataaggctagtccgttatcagcgtgacagaaatgtcacgcggcaccgagtcggtgc

SEQ ID NO: 3917 - RNA, 84 nt, synthetic construct
  source 1..84: mol_type = other RNA
gtttaagagctagaaatagcaagtttaaataaggctagtccgttatcagcgttgtcgaaagacgacgcggcaccgagtcggtgc

SEQ ID NO: 3918 - RNA, 84 nt, synthetic construct
  source 1..84: mol_type = other RNA
gtttaagagctagaaatagcaagtttaaataaggctagtccgttatcagcgtccacgaaagtggacgcggcaccgagtcggtgc

SEQ ID NO: 3919 - RNA, 84 nt, synthetic construct
  source 1..84: mol_type = other RNA
gtttaagagctagaaatagcaagtttaaataaggctagtccgttatcagcgtgacggaaacgtcacgcggcaccgagtcggtgc

SEQ ID NO: 3920 - RNA, 84 nt, synthetic construct
  source 1..84: mol_type = other RNA
gtttaagagctagaaatagcaagtttaaataaggctagtccgttatcagcgtggtggaaacaccacgcggcaccgagtcggtgc

SEQ ID NO: 3921 - RNA, 84 nt, synthetic construct
  source 1..84: mol_type = other RNA
gtttaagagctagaaatagcaagtttaaataaggctagtccgttatcagcgtgaaggaaacttcacgcggcaccgagtcggtgc

SEQ ID NO: 3922 - RNA, 84 nt, synthetic construct
  source 1..84: mol_type = other RNA
gtttaagagctagaaatagcaagtttaaataaggctagtccgttatcagcgtccccgaaaggggacgcggcaccgagtcggtgc

SEQ ID NO: 3923 - RNA, 84 nt, synthetic construct
  source 1..84: mol_type = other RNA
gtttaagagctagaaatagcaagtttaaataaggctagtccgttatcagcgtgtgtgaaaacgcacgcggcaccgagtcggtgc

SEQ ID NO: 3924 - RNA, 84 nt, synthetic construct
  source 1..84: mol_type = other RNA
gtttaagagctagaaatagcaagtttaaataaggctagtccgttatcagcgtgcgggaaaccgcacgcggcaccgagtcggtgc

SEQ ID NO: 3925 - RNA, 84 nt, synthetic construct
  source 1..84: mol_type = other RNA
gtttaagagctagaaatagcaagtttaaataaggctagtccgttatcagcgttgaggaaactcaacgcggcaccgagtcggtgc

SEQ ID NO: 3926 - RNA, 84 nt, synthetic construct
  source 1..84: mol_type = other RNA
gtttaagagctagaaatagcaagtttaaataaggctagtccgttatcagcgtacgggaaaccgtacgcggcaccgagtcggtgc

SEQ ID NO: 3927 - RNA, 84 nt, synthetic construct
  source 1..84: mol_type = other RNA
gtttaagagctagaaatagcaagtttaaataaggctagtccgttatcagcgtagacgaaagtctacgcggcaccgagtcggtgc

SEQ ID NO: 3928 - RNA, 84 nt, synthetic construct
  source 1..84: mol_type = other RNA
gtttaagagctagaaatagcaagtttaaataaggctagtccgttatcagcgtcttcgaaagaagacgcggcaccgagtcggtgc

SEQ ID NO: 3929 - RNA, 84 nt, synthetic construct
  source 1..84: mol_type = other RNA
gtttaagagctagaaatagcaagtttaaataaggctagtccgttatcagcgtatgggaaaccatacgcggcaccgagtcggtgc

SEQ ID NO: 3930 - RNA, 84 nt, synthetic construct
  source 1..84: mol_type = other RNA
gtttaagagctagaaatagcaagtttaaataaggctagtccgttatcagcgtgtgggaaaccacacgcggcaccgagtcggtgc

SEQ ID NO: 3931 - RNA, 84 nt, synthetic construct
  source 1..84: mol_type = other RNA
gtttaagagctagaaatagcaagtttaaataaggctagtccgttatcagcgttggcgaaagccgacgcggcaccgagtcggtgc

SEQ ID NO: 3932 - RNA, 84 nt, synthetic construct
  source 1..84: mol_type = other RNA
gtttaagagctagaaatagcaagtttaaataaggctagtccgttatcagcgtaagggaaaccttacgcggcaccgagtcggtgc

SEQ ID NO: 3933 - RNA, 84 nt, synthetic construct
  source 1..84: mol_type = other RNA
gtttaagagctagaaatagcaagtttaaataaggctagtccgttatcagcgtcagcgaaagctgacgcggcaccgagtcggtgc

SEQ ID NO: 3934 - RNA, 84 nt, synthetic construct
  source 1..84: mol_type = other RNA
gtttaagagctagaaatagcaagtttaaataaggctagtccgttatcagcgtacacgaaagtgtacgcggcaccgagtcggtgc

SEQ ID NO: 3935 - RNA, 84 nt, synthetic construct
  source 1..84: mol_type = other RNA
gtttaagagctagaaatagcaagtttaaataaggctagtccgttatcagcgtcgtcgaaaggcgacgcggcaccgagtcggtgc

SEQ ID NO: 3936 - RNA, 84 nt, synthetic construct
  source 1..84: mol_type = other RNA
gtttaagagctagaaatagcaagtttaaataaggctagtccgttatcagcgttgccgaaaggcaacgcggcaccgagtcggtgc

SEQ ID NO: 3937 - RNA, 84 nt, synthetic construct
  source 1..84: mol_type = other RNA
gtttaagagctagaaatagcaagtttaaataaggctagtccgttatcagcgttggagaaatccaacgcggcaccgagtcggtgc

SEQ ID NO: 3938 - RNA, 84 nt, synthetic construct
  source 1..84: mol_type = other RNA
gtttaagagctagaaatagcaagtttaaataaggctagtccgttatcagcgtactcgaaagagtacgcggcaccgagtcggtgc

SEQ ID NO: 3939 - RNA, 84 nt, synthetic construct
  source 1..84: mol_type = other RNA
gtttaagagctagaaatagcaagtttaaataaggctagtccgttatcagcgtacgtgaaaacgtacgcggcaccgagtcggtgc

SEQ ID NO: 3940 - RNA, 84 nt, synthetic construct
  source 1..84: mol_type = other RNA
gtttaagagctagaaatagcaagtttaaataaggctagtccgttatcagcgtaacggaaacgttacgcggcaccgagtcggtgc

SEQ ID NO: 3941 - RNA, 84 nt, synthetic construct
  source 1..84: mol_type = other RNA
gtttaagagctagaaatagcaagtttaaataaggctagtccgttatcagcgtcatcgaaaggtgacgcggcaccgagtcggtgc

SEQ ID NO: 3942 - RNA, 84 nt, synthetic construct
  source 1..84: mol_type = other RNA
gtttaagagctagaaatagcaagtttaaataaggctagtccgttatcagcgtttgggaaaccagacgcggcaccgagtcggtgc

SEQ ID NO: 3943 - RNA, 84 nt, synthetic construct
  source 1..84: mol_type = other RNA
gtttaagagctagaaatagcaagtttaaataaggctagtccgttatcagcgtcaaggaaacttgacgcggcaccgagtcggtgc

SEQ ID NO: 3944 - RNA, 84 nt, synthetic construct
  source 1..84: mol_type = other RNA
gtttaagagctagaaatagcaagtttaaataaggctagtccgttatcagcgttggtgaaagccaacgcggcaccgagtcggtgc

SEQ ID NO: 3945 - RNA, 84 nt, synthetic construct
  source 1..84: mol_type = other RNA
gtttaagagctagaaatagcaagtttaaataaggctagtccgttatcagcgttcgagaaatcggacgcggcaccgagtcggtgc

SEQ ID NO: 3946 - RNA, 84 nt, synthetic construct
  source 1..84: mol_type = other RNA
gtttaagagctagaaatagcaagtttaaataaggctagtccgttatcagcgtgggtgaaaacccacgcggcaccgagtcggtgc

SEQ ID NO: 3947 - RNA, 84 nt, synthetic construct
  source 1..84: mol_type = other RNA
gtttaagagctagaaatagcaagtttaaataaggctagtccgttatcagcgtgatcgaaagatcacgcggcaccgagtcggtgc

SEQ ID NO: 3948 - RNA, 84 nt, synthetic construct
  source 1..84: mol_type = other RNA
gtttaagagctagaaatagcaagtttaaataaggctagtccgttatcagcgttgcggaaacgcaacgcggcaccgagtcggtgc

SEQ ID NO: 3949 - RNA, 84 nt, synthetic construct
  source 1..84: mol_type = other RNA
gtttaagagctagaaatagcaagtttaaataaggctagtccgttatcagcgtttcggaaacgagacgcggcaccgagtcggtgc

SEQ ID NO: 3950 - RNA, 84 nt, synthetic construct
  source 1..84: mol_type = other RNA
gtttaagagctagaaatagcaagtttaaataaggctagtccgttatcagcgtgtcagaaatggcacgcggcaccgagtcggtgc

SEQ ID NO: 3951 - RNA, 84 nt, synthetic construct
  source 1..84: mol_type = other RNA
gtttaagagctagaaatagcaagtttaaataaggctagtccgttatcagcgttgccgaaaggtaacgcggcaccgagtcggtgc

SEQ ID NO: 3952 - RNA, 84 nt, synthetic construct
  source 1..84: mol_type = other RNA
gtttaagagctagaaatagcaagtttaaataaggctagtccgttatcagcgtcgaggaaactcgacgcggcaccgagtcggtgc

SEQ ID NO: 3953 - RNA, 84 nt, synthetic construct
  source 1..84: mol_type = other RNA
gtttaagagctagaaatagcaagtttaaataaggctagtccgttatcagcgtcgcagaaatgcgacgcggcaccgagtcggtgc

SEQ ID NO: 3954 - RNA, 84 nt, synthetic construct
  source 1..84: mol_type = other RNA
gtttaagagctagaaatagcaagtttaaataaggctagtccgttatcagcgtccttgaaaaaggacgcggcaccgagtcggtgc

SEQ ID NO: 3955 - RNA, 84 nt, synthetic construct
  source 1..84: mol_type = other RNA
gtttaagagctagaaatagcaagtttaaataaggctagtccgttatcagcgtcgatgaaaatcgacgcggcaccgagtcggtgc

SEQ ID NO: 3956 - RNA, 84 nt, synthetic construct
  source 1..84: mol_type = other RNA
gtttaagagctagaaatagcaagtttaaataaggctagtccgttatcagcgtcgtcgaaagacgacgcggcaccgagtcggtgc

SEQ ID NO: 3957 - RNA, 84 nt, synthetic construct
  source 1..84: mol_type = other RNA
gtttaagagctagaaatagcaagtttaaataaggctagtccgttatcagcgtcactgaaaagtgacgcggcaccgagtcggtgc

SEQ ID NO: 3958 - RNA, 84 nt, synthetic construct
  source 1..84: mol_type = other RNA
gtttaagagctagaaatagcaagtttaaataaggctagtccgttatcagcgtaccagaaatggtacgcggcaccgagtcggtgc

SEQ ID NO: 3959 - RNA, 84 nt, synthetic construct
  source 1..84: mol_type = other RNA
gtttaagagctagaaatagcaagtttaaataaggctagtccgttatcagcgtctccgaaaggagacgcggcaccgagtcggtgc

SEQ ID NO: 3960 - RNA, 86 nt, synthetic construct
  source 1..86: mol_type = other RNA
gtttaagagctagaaatagcaagtttaaataaggctagtccgttatcagcgtggggcgaaagcctcacgcggcaccgagtcggtgc

SEQ ID NO: 3961 - RNA, 86 nt, synthetic construct
  source 1..86: mol_type = other RNA
gtttaagagctagaaatagcaagtttaaataaggctagtccgttatcagcgtctcaggaaactgagacgcggcaccgagtcggtgc

SEQ ID NO: 3962 - RNA, 86 nt, synthetic construct
  source 1..86: mol_type = other RNA
gtttaagagctagaaatagcaagtttaaataaggctagtccgttatcagcgtcggccgaaaggccgacgcggcaccgagtcggtgc

SEQ ID NO: 3963 - RNA, 86 nt, synthetic construct
  source 1..86: mol_type = other RNA
gtttaagagctagaaatagcaagtttaaataaggctagtccgttatcagcgtgcgatgaaagtcgcacgcggcaccgagtcggtgc

SEQ ID NO: 3964 - RNA, 86 nt, synthetic construct
  source 1..86: mol_type = other RNA
gtttaagagctagaaatagcaagtttaaataaggctagtccgttatcagcgtagtgggaaaccactacgcggcaccgagtcggtgc

SEQ ID NO: 3965 - RNA, 86 nt, synthetic construct
  source 1..86: mol_type = other RNA
gtttaagagctagaaatagcaagtttaaataaggctagtccgttatcagcgttcgccgaaaggcgaacgcggcaccgagtcggtgc

SEQ ID NO: 3966 - RNA, 86 nt, synthetic construct
  source 1..86: mol_type = other RNA
gtttaagagctagaaatagcaagtttaaataaggctagtccgttatcagcgtgccgagaaattggcacgcggcaccgagtcggtgc

SEQ ID NO: 3967 - RNA, 86 nt, synthetic construct
  source 1..86: mol_type = other RNA
gtttaagagctagaaatagcaagtttaaataaggctagtccgttatcagcgtagctcgaaagagctacgcggcaccgagtcggtgc

SEQ ID NO: 3968 - RNA, 86 nt, synthetic construct
  source 1..86: mol_type = other RNA
gtttaagagctagaaatagcaagtttaaataaggctagtccgttatcagcgtcaggagaaatcctgacgcggcaccgagtcggtgc

SEQ ID NO: 3969 - RNA, 86 nt, synthetic construct
  source 1..86: mol_type = other RNA
gtttaagagctagaaatagcaagtttaaataaggctagtccgttatcagcgtacggggaaacccgtacgcggcaccgagtcggtgc

SEQ ID NO: 3970 - RNA, 86 nt, synthetic construct
  source 1..86: mol_type = other RNA
gtttaagagctagaaatagcaagtttaaataaggctagtccgttatcagcgtcaggtgaaagcctgacgcggcaccgagtcggtgc

SEQ ID NO: 3971 - RNA, 86 nt, synthetic construct
  source 1..86: mol_type = other RNA
gtttaagagctagaaatagcaagtttaaataaggctagtccgttatcagcgttccaggaaactggaacgcggcaccgagtcggtgc

SEQ ID NO: 3972 - RNA, 86 nt, synthetic construct
  source 1..86: mol_type = other RNA
gtttaagagctagaaatagcaagtttaaataaggctagtccgttatcagcgtgagaggaaactctcacgcggcaccgagtcggtgc

SEQ ID NO: 3973 - RNA, 86 nt, synthetic construct
  source 1..86: mol_type = other RNA
gtttaagagctagaaatagcaagtttaaataaggctagtccgttatcagcgtcactcgaaagagtgacgcggcaccgagtcggtgc

SEQ ID NO: 3974 - RNA, 86 nt, synthetic construct
  source 1..86: mol_type = other RNA
gtttaagagctagaaatagcaagtttaaataaggctagtccgttatcagcgtgttgcgaaagcagcacgcggcaccgagtcggtgc

SEQ ID NO: 3975 - RNA, 86 nt, synthetic construct
  source 1..86: mol_type = other RNA
gtttaagagctagaaatagcaagtttaaataaggctagtccgttatcagcgtgtagggaaacctgcacgcggcaccgagtcggtgc

SEQ ID NO: 3976 - RNA, 86 nt, synthetic construct
  source 1..86: mol_type = other RNA
gtttaagagctagaaatagcaagtttaaataaggctagtccgttatcagcgtgtcctgaaagggacacgcggcaccgagtcggtgc

SEQ ID NO: 3977 - RNA, 86 nt, synthetic construct
  source 1..86: mol_type = other RNA
gtttaagagctagaaatagcaagtttaaataaggctagtccgttatcagcgtaacccgaaagggttacgcggcaccgagtcggtgc

SEQ ID NO: 3978 - RNA, 86 nt, synthetic construct
  source 1..86: mol_type = other RNA
gtttaagagctagaaatagcaagtttaaataaggctagtccgttatcagcgtacccggaaacgggtacgcggcaccgagtcggtgc

SEQ ID NO: 3979 - RNA, 86 nt, synthetic construct
  source 1..86: mol_type = other RNA
gtttaagagctagaaatagcaagtttaaataaggctagtccgttatcagcgtgcgttgaaagacgcacgcggcaccgagtcggtgc

SEQ ID NO: 3980 - RNA, 86 nt, synthetic construct
  source 1..86: mol_type = other RNA
gtttaagagctagaaatagcaagtttaaataaggctagtccgttatcagcgtgccgcgaaagcggcacgcggcaccgagtcggtgc

SEQ ID NO: 3981 - RNA, 86 nt, synthetic construct
  source 1..86: mol_type = other RNA
gtttaagagctagaaatagcaagtttaaataaggctagtccgttatcagcgttgggggaaatcccaacgcggcaccgagtcggtgc

SEQ ID NO: 3982 - RNA, 86 nt, synthetic construct
  source 1..86: mol_type = other RNA
gtttaagagctagaaatagcaagtttaaataaggctagtccgttatcagcgtgcagagaaatctgcacgcggcaccgagtcggtgc

SEQ ID NO: 3983 - RNA, 86 nt, synthetic construct
  source 1..86: mol_type = other RNA
gtttaagagctagaaatagcaagtttaaataaggctagtccgttatcagcgtgtcgtgaaaacgacacgcggcaccgagtcggtgc

SEQ ID NO: 3984 - RNA, 86 nt, synthetic construct
  source 1..86: mol_type = other RNA
gtttaagagctagaaatagcaagtttaaataaggctagtccgttatcagcgtcgtacgaaagtacgacgcggcaccgagtcggtgc

SEQ ID NO: 3985 - RNA, 86 nt, synthetic construct
  source 1..86: mol_type = other RNA
gtttaagagctagaaatagcaagtttaaataaggctagtccgttatcagcgttacgcgaaagcgtgacgcggcaccgagtcggtgc

SEQ ID NO: 3986 - RNA, 86 nt, synthetic construct
  source 1..86: mol_type = other RNA
gtttaagagctagaaatagcaagtttaaataaggctagtccgttatcagcgtcagcggaaacgttgacgcggcaccgagtcggtgc

SEQ ID NO: 3987 - RNA, 86 nt, synthetic construct
  source 1..86: mol_type = other RNA
gtttaagagctagaaatagcaagtttaaataaggctagtccgttatcagcgtctgacgaaagtcagacgcggcaccgagtcggtgc

SEQ ID NO: 3988 - RNA, 86 nt, synthetic construct
  source 1..86: mol_type = other RNA
gtttaagagctagaaatagcaagtttaaataaggctagtccgttatcagcgtctcgcgaaagcgagacgcggcaccgagtcggtgc

SEQ ID NO: 3989 - RNA, 86 nt, synthetic construct
  source 1..86: mol_type = other RNA
gtttaagagctagaaatagcaagtttaaataaggctagtccgttatcagcgttgggcgaaagcctaacgcggcaccgagtcggtgc

SEQ ID NO: 3990 - RNA, 86 nt, synthetic construct
  source 1..86: mol_type = other RNA
gtttaagagctagaaatagcaagtttaaataaggctagtccgttatcagcgtccagggaaacctggacgcggcaccgagtcggtgc

SEQ ID NO: 3991 - RNA, 86 nt, synthetic construct
  source 1..86: mol_type = other RNA
gtttaagagctagaaatagcaagtttaaataaggctagtccgttatcagcgtaccctgaaaggggtacgcggcaccgagtcggtgc

SEQ ID NO: 3992 - RNA, 86 nt, synthetic construct
  source 1..86: mol_type = other RNA
gtttaagagctagaaatagcaagtttaaataaggctagtccgttatcagcgttcccggaaacggggacgcggcaccgagtcggtgc

SEQ ID NO: 3993 - RNA, 86 nt, synthetic construct
  source 1..86: mol_type = other RNA
gtttaagagctagaaatagcaagtttaaataaggctagtccgttatcagcgtacacggaaacgtgtacgcggcaccgagtcggtgc

SEQ ID NO: 3994 - RNA, 86 nt, synthetic construct
  source 1..86: mol_type = other RNA
gtttaagagctagaaatagcaagtttaaataaggctagtccgttatcagcgtccacggaaacgtggacgcggcaccgagtcggtgc

SEQ ID NO: 3995 - RNA, 86 nt, synthetic construct
  source 1..86: mol_type = other RNA
gtttaagagctagaaatagcaagtttaaataaggctagtccgttatcagcgtgccatgaaagtggcacgcggcaccgagtcggtgc

SEQ ID NO: 3996 - RNA, 86 nt, synthetic construct
  source 1..86: mol_type = other RNA
gtttaagagctagaaatagcaagtttaaataaggctagtccgttatcagcgtacctcgaaagaggtacgcggcaccgagtcggtgc

SEQ ID NO: 3997 - RNA, 86 nt, synthetic construct
  source 1..86: mol_type = other RNA
gtttaagagctagaaatagcaagtttaaataaggctagtccgttatcagcgtgtctcgaaagaggcacgcggcaccgagtcggtgc

SEQ ID NO: 3998 - RNA, 86 nt, synthetic construct
  source 1..86: mol_type = other RNA
gtttaagagctagaaatagcaagtttaaataaggctagtccgttatcagcgtcgaccgaaaggtcgacgcggcaccgagtcggtgc

SEQ ID NO: 3999 - RNA, 86 nt, synthetic construct
  source 1..86: mol_type = other RNA
gtttaagagctagaaatagcaagtttaaataaggctagtccgttatcagcgtcagacgaaagtctgacgcggcaccgagtcggtgc

SEQ ID NO: 4000 - RNA, 86 nt, synthetic construct
  source 1..86: mol_type = other RNA
gtttaagagctagaaatagcaagtttaaataaggctagtccgttatcagcgtgatgggaaaccgtcacgcggcaccgagtcggtgc

SEQ ID NO: 4001 - RNA, 86 nt, synthetic construct
  source 1..86: mol_type = other RNA
gtttaagagctagaaatagcaagtttaaataaggctagtccgttatcagcgtagggggaaacccctacgcggcaccgagtcggtgc

SEQ ID NO: 4002 - RNA, 86 nt, synthetic construct
  source 1..86: mol_type = other RNA
gtttaagagctagaaatagcaagtttaaataaggctagtccgttatcagcgtaccacgaaagtggtacgcggcaccgagtcggtgc

SEQ ID NO: 4003 - RNA, 86 nt, synthetic construct
  source 1..86: mol_type = other RNA
gtttaagagctagaaatagcaagtttaaataaggctagtccgttatcagcgtgcgacgaaagtcgcacgcggcaccgagtcggtgc

SEQ ID NO: 4004 - RNA, 86 nt, synthetic construct
  source 1..86: mol_type = other RNA
gtttaagagctagaaatagcaagtttaaataaggctagtccgttatcagcgtcgggggaaaccccgacgcggcaccgagtcggtgc

SEQ ID NO: 4005 - RNA, 86 nt, synthetic construct
  source 1..86: mol_type = other RNA
gtttaagagctagaaatagcaagtttaaataaggctagtccgttatcagcgtaccgagaaatcggtacgcggcaccgagtcggtgc

SEQ ID NO: 4006 - RNA, 86 nt, synthetic construct
  source 1..86: mol_type = other RNA
gtttaagagctagaaatagcaagtttaaataaggctagtccgttatcagcgttgtcggaaacgacgacgcggcaccgagtcggtgc

SEQ ID NO: 4007 - RNA, 86 nt, synthetic construct
  source 1..86: mol_type = other RNA
gtttaagagctagaaatagcaagtttaaataaggctagtccgttatcagcgtggacggaaatgtccacgcggcaccgagtcggtgc

SEQ ID NO: 4008 - RNA, 86 nt, synthetic construct
  source 1..86: mol_type = other RNA
gtttaagagctagaaatagcaagtttaaataaggctagtccgttatcagcgtcaggcgaaagcctgacgcggcaccgagtcggtgc

SEQ ID NO: 4009 - RNA, 86 nt, synthetic construct
  source 1..86: mol_type = other RNA
gtttaagagctagaaatagcaagtttaaataaggctagtccgttatcagcgtcttccgaaaggaagacgcggcaccgagtcggtgc

SEQ ID NO: 4010 - RNA, 86 nt, synthetic construct
  source 1..86: mol_type = other RNA
gtttaagagctagaaatagcaagtttaaataaggctagtccgttatcagcgttccgagaaatcggaacgcggcaccgagtcggtgc

SEQ ID NO: 4011 - RNA, 86 nt, synthetic construct
  source 1..86: mol_type = other RNA
gtttaagagctagaaatagcaagtttaaataaggctagtccgttatcagcgtacgccgaaaggtgtacgcggcaccgagtcggtgc

SEQ ID NO: 4012 - RNA, 86 nt, synthetic construct
  source 1..86: mol_type = other RNA
gtttaagagctagaaatagcaagtttaaataaggctagtccgttatcagcgtggcgtgaaaacgctacgcggcaccgagtcggtgc

SEQ ID NO: 4013 - RNA, 86 nt, synthetic construct
  source 1..86: mol_type = other RNA
gtttaagagctagaaatagcaagtttaaataaggctagtccgttatcagcgtgggacgaaagtcctacgcggcaccgagtcggtgc

SEQ ID NO: 4014 - RNA, 86 nt, synthetic construct
  source 1..86: mol_type = other RNA
gtttaagagctagaaatagcaagtttaaataaggctagtccgttatcagcgtctggggaaacccagacgcggcaccgagtcggtgc

SEQ ID NO: 4015 - RNA, 86 nt, synthetic construct
  source 1..86: mol_type = other RNA
gtttaagagctagaaatagcaagtttaaataaggctagtccgttatcagcgtgcatcgaaagatgcacgcggcaccgagtcggtgc

SEQ ID NO: 4016 - RNA, 86 nt, synthetic construct
  source 1..86: mol_type = other RNA
gtttaagagctagaaatagcaagtttaaataaggctagtccgttatcagcgtaacgcgaaagcgttacgcggcaccgagtcggtgc

SEQ ID NO: 4017 - RNA, 86 nt, synthetic construct
  source 1..86: mol_type = other RNA
gtttaagagctagaaatagcaagtttaaataaggctagtccgttatcagcgtgccaggaaactggcacgcggcaccgagtcggtgc

SEQ ID NO: 4018 - RNA, 86 nt, synthetic construct
  source 1..86: mol_type = other RNA
gtttaagagctagaaatagcaagtttaaataaggctagtccgttatcagcgttcacggaaacgtgaacgcggcaccgagtcggtgc

SEQ ID NO: 4019 - RNA, 86 nt, synthetic construct
  source 1..86: mol_type = other RNA
gtttaagagctagaaatagcaagtttaaataaggctagtccgttatcagcgtacgacgaaagtcgtacgcggcaccgagtcggtgc

SEQ ID NO: 4020 - RNA, 86 nt, synthetic construct
  source 1..86: mol_type = other RNA
gtttaagagctagaaatagcaagtttaaataaggctagtccgttatcagcgtgctgggaaaccagcacgcggcaccgagtcggtgc

SEQ ID NO: 4021 - RNA, 86 nt, synthetic construct
  source 1..86: mol_type = other RNA
gtttaagagctagaaatagcaagtttaaataaggctagtccgttatcagcgtctccagaaatggggacgcggcaccgagtcggtgc

SEQ ID NO: 4022 - RNA, 86 nt, synthetic construct
  source 1..86: mol_type = other RNA
gtttaagagctagaaatagcaagtttaaataaggctagtccgttatcagcgttgggggaaaccccaacgcggcaccgagtcggtgc

SEQ ID NO: 4023 - RNA, 86 nt, synthetic construct
  source 1..86: mol_type = other RNA
gtttaagagctagaaatagcaagtttaaataaggctagtccgttatcagcgtagcccgaaagggctacgcggcaccgagtcggtgc

SEQ ID NO: 4024 - RNA, 86 nt, synthetic construct
  source 1..86: mol_type = other RNA
gtttaagagctagaaatagcaagtttaaataaggctagtccgttatcagcgtacccagaaatgggtacgcggcaccgagtcggtgc

SEQ ID NO: 4025 - RNA, 86 nt, synthetic construct
  source 1..86: mol_type = other RNA
gtttaagagctagaaatagcaagtttaaataaggctagtccgttatcagcgtagcgtgaaagcgctacgcggcaccgagtcggtgc

SEQ ID NO: 4026 - RNA, 86 nt, synthetic construct
  source 1..86: mol_type = other RNA
gtttaagagctagaaatagcaagtttaaataaggctagtccgttatcagcgtgcctagaaataggcacgcggcaccgagtcggtgc

SEQ ID NO: 4027 - RNA, 86 nt, synthetic construct
  source 1..86: mol_type = other RNA
gtttaagagctagaaatagcaagtttaaataaggctagtccgttatcagcgtctgtcgaaagacagacgcggcaccgagtcggtgc

SEQ ID NO: 4028 - RNA, 86 nt, synthetic construct
  source 1..86: mol_type = other RNA
gtttaagagctagaaatagcaagtttaaataaggctagtccgttatcagcgtgcagggaaacctgcacgcggcaccgagtcggtgc

SEQ ID NO: 4029 - RNA, 86 nt, synthetic construct
  source 1..86: mol_type = other RNA
gtttaagagctagaaatagcaagtttaaataaggctagtccgttatcagcgtgtagggaaacctacacgcggcaccgagtcggtgc

SEQ ID NO: 4030 - RNA, 86 nt, synthetic construct
  source 1..86: mol_type = other RNA
gtttaagagctagaaatagcaagtttaaataaggctagtccgttatcagcgtccgctgaaaggcggacgcggcaccgagtcggtgc

SEQ ID NO: 4031 - RNA, 86 nt, synthetic construct
  source 1..86: mol_type = other RNA
gtttaagagctagaaatagcaagtttaaataaggctagtccgttatcagcgtgtgtcgaaaggcacacgcggcaccgagtcggtgc

SEQ ID NO: 4032 - RNA, 86 nt, synthetic construct
  source 1..86: mol_type = other RNA
gtttaagagctagaaatagcaagtttaaataaggctagtccgttatcagcgtcctacgaaagtgggacgcggcaccgagtcggtgc

SEQ ID NO: 4033 - RNA, 86 nt, synthetic construct
  source 1..86: mol_type = other RNA
gtttaagagctagaaatagcaagtttaaataaggctagtccgttatcagcgtgtggggaaacccacacgcggcaccgagtcggtgc

SEQ ID NO: 4034 - RNA, 86 nt, synthetic construct
  source 1..86: mol_type = other RNA
gtttaagagctagaaatagcaagtttaaataaggctagtccgttatcagcgtcgggtgaaaactcgacgcggcaccgagtcggtgc

SEQ ID NO: 4035 - RNA, 86 nt, synthetic construct
  source 1..86: mol_type = other RNA
gtttaagagctagaaatagcaagtttaaataaggctagtccgttatcagcgttgtcggaaacgacaacgcggcaccgagtcggtgc

SEQ ID NO: 4036 - RNA, 86 nt, synthetic construct
  source 1..86: mol_type = other RNA
gtttaagagctagaaatagcaagtttaaataaggctagtccgttatcagcgtcccccgaaagggggacgcggcaccgagtcggtgc

SEQ ID NO: 4037 - RNA, 86 nt, synthetic construct
  source 1..86: mol_type = other RNA
gtttaagagctagaaatagcaagtttaaataaggctagtccgttatcagcgttgggcgaaagcccaacgcggcaccgagtcggtgc

SEQ ID NO: 4038 - RNA, 86 nt, synthetic construct
  source 1..86: mol_type = other RNA
gtttaagagctagaaatagcaagtttaaataaggctagtccgttatcagcgtggaccgaaaggttcacgcggcaccgagtcggtgc

SEQ ID NO: 4039 - RNA, 86 nt, synthetic construct
  source 1..86: mol_type = other RNA
gtttaagagctagaaatagcaagtttaaataaggctagtccgttatcagcgtgtcgcgaaagcgatacgcggcaccgagtcggtgc

SEQ ID NO: 4040 - RNA, 86 nt, synthetic construct
  source 1..86: mol_type = other RNA
gtttaagagctagaaatagcaagtttaaataaggctagtccgttatcagcgtcctgcgaaagcaggacgcggcaccgagtcggtgc

SEQ ID NO: 4041 - RNA, 86 nt, synthetic construct
  source 1..86: mol_type = other RNA
gtttaagagctagaaatagcaagtttaaataaggctagtccgttatcagcgtgacctgaaaaggtcacgcggcaccgagtcggtgc

SEQ ID NO: 4042 - RNA, 86 nt, synthetic construct
  source 1..86: mol_type = other RNA
gtttaagagctagaaatagcaagtttaaataaggctagtccgttatcagcgtgcaccgaaaggtgcacgcggcaccgagtcggtgc

SEQ ID NO: 4043 - RNA, 86 nt, synthetic construct
  source 1..86: mol_type = other RNA
gtttaagagctagaaatagcaagtttaaataaggctagtccgttatcagcgtagggcgaaagccctacgcggcaccgagtcggtgc

SEQ ID NO: 4044 - RNA, 86 nt, synthetic construct
  source 1..86: mol_type = other RNA
gtttaagagctagaaatagcaagtttaaataaggctagtccgttatcagcgtgatcggaaacggtcacgcggcaccgagtcggtgc

SEQ ID NO: 4045 - RNA, 86 nt, synthetic construct
  source 1..86: mol_type = other RNA
gtttaagagctagaaatagcaagtttaaataaggctagtccgttatcagcgtcgcgtgaaagcgtgacgcggcaccgagtcggtgc

SEQ ID NO: 4046 - RNA, 86 nt, synthetic construct
  source 1..86: mol_type = other RNA
gtttaagagctagaaatagcaagtttaaataaggctagtccgttatcagcgtatcgcgaaagcgatacgcggcaccgagtcggtgc

SEQ ID NO: 4047 - RNA, 86 nt, synthetic construct
  source 1..86: mol_type = other RNA
gtttaagagctagaaatagcaagtttaaataaggctagtccgttatcagcgtcccaggaaactgggacgcggcaccgagtcggtgc

SEQ ID NO: 4048 - RNA, 86 nt, synthetic construct
  source 1..86: mol_type = other RNA
gtttaagagctagaaatagcaagtttaaataaggctagtccgttatcagcgtccgccgaaaggcggacgcggcaccgagtcggtgc

SEQ ID NO: 4049 - RNA, 86 nt, synthetic construct
  source 1..86: mol_type = other RNA
gtttaagagctagaaatagcaagtttaaataaggctagtccgttatcagcgtcacgcgaaagcgtgacgcggcaccgagtcggtgc

SEQ ID NO: 4050 - RNA, 86 nt, synthetic construct
  source 1..86: mol_type = other RNA
gtttaagagctagaaatagcaagtttaaataaggctagtccgttatcagcgtctgcagaaatgcagacgcggcaccgagtcggtgc

SEQ ID NO: 4051 - RNA, 86 nt, synthetic construct
  source 1..86: mol_type = other RNA
gtttaagagctagaaatagcaagtttaaataaggctagtccgttatcagcgtggtaggaaactaccacgcggcaccgagtcggtgc

SEQ ID NO: 4052 - RNA, 86 nt, synthetic construct
  source 1..86: mol_type = other RNA
gtttaagagctagaaatagcaagtttaaataaggctagtccgttatcagcgtggcctgaaaaggccacgcggcaccgagtcggtgc

SEQ ID NO: 4053 - RNA, 86 nt, synthetic construct
  source 1..86: mol_type = other RNA
gtttaagagctagaaatagcaagtttaaataaggctagtccgttatcagcgtgagacgaaagtctcacgcggcaccgagtcggtgc

SEQ ID NO: 4054 - RNA, 86 nt, synthetic construct
  source 1..86: mol_type = other RNA
gtttaagagctagaaatagcaagtttaaataaggctagtccgttatcagcgttcaccgaaaggtggacgcggcaccgagtcggtgc

SEQ ID NO: 4055 - RNA, 86 nt, synthetic construct
  source 1..86: mol_type = other RNA
gtttaagagctagaaatagcaagtttaaataaggctagtccgttatcagcgtgttccgaaaggaacacgcggcaccgagtcggtgc

SEQ ID NO: 4056 - RNA, 86 nt, synthetic construct
  source 1..86: mol_type = other RNA
gtttaagagctagaaatagcaagtttaaataaggctagtccgttatcagcgtgcgcggaaacgcgtacgcggcaccgagtcggtgc

SEQ ID NO: 4057 - RNA, 86 nt, synthetic construct
  source 1..86: mol_type = other RNA
gtttaagagctagaaatagcaagtttaaataaggctagtccgttatcagcgttcaccgaaaggtgaacgcggcaccgagtcggtgc

SEQ ID NO: 4058 - RNA, 86 nt, synthetic construct
  source 1..86: mol_type = other RNA
gtttaagagctagaaatagcaagtttaaataaggctagtccgttatcagcgtgacccgaaagggttacgcggcaccgagtcggtgc

SEQ ID NO: 4059 - RNA, 86 nt, synthetic construct
  source 1..86: mol_type = other RNA
gtttaagagctagaaatagcaagtttaaataaggctagtccgttatcagcgtgtacggaaacgtgcacgcggcaccgagtcggtgc

SEQ ID NO: 4060 - RNA, 88 nt, synthetic construct
  source 1..88: mol_type = other RNA
gtttaagagctagaaatagcaagtttaaataaggctagtccgttatcagcgtcatgcggaaacgcatgacgcggcaccgagtcggtgc

SEQ ID NO: 4061 - RNA, 88 nt, synthetic construct
  source 1..88: mol_type = other RNA
gtttaagagctagaaatagcaagtttaaataaggctagtccgttatcagcgtggggttgaaaaaccccacgcggcaccgagtcggtgc

SEQ ID NO: 4062 - RNA, 88 nt, synthetic construct
  source 1..88: mol_type = other RNA
gtttaagagctagaaatagcaagtttaaataaggctagtccgttatcagcgtgacagcgaaagctgtcacgcggcaccgagtcggtgc

SEQ ID NO: 4063 - RNA, 88 nt, synthetic construct
  source 1..88: mol_type = other RNA
gtttaagagctagaaatagcaagtttaaataaggctagtccgttatcagcgtggcgtagaaatacgctacgcggcaccgagtcggtgc

SEQ ID NO: 4064 - RNA, 88 nt, synthetic construct
  source 1..88: mol_type = other RNA
gtttaagagctagaaatagcaagtttaaataaggctagtccgttatcagcgtgtaacggaaacgttgcacgcggcaccgagtcggtgc

SEQ ID NO: 4065 - RNA, 88 nt, synthetic construct
  source 1..88: mol_type = other RNA
gtttaagagctagaaatagcaagtttaaataaggctagtccgttatcagcgtcgtcacgaaagtgacgacgcggcaccgagtcggtgc

SEQ ID NO: 4066 - RNA, 88 nt, synthetic construct
  source 1..88: mol_type = other RNA
gtttaagagctagaaatagcaagtttaaataaggctagtccgttatcagcgttacaccgaaaggtgtgacgcggcaccgagtcggtgc

SEQ ID NO: 4067 - RNA, 88 nt, synthetic construct
  source 1..88: mol_type = other RNA
gtttaagagctagaaatagcaagtttaaataaggctagtccgttatcagcgtgacgcggaaacgcgtcacgcggcaccgagtcggtgc

SEQ ID NO: 4068 - RNA, 88 nt, synthetic construct
  source 1..88: mol_type = other RNA
gtttaagagctagaaatagcaagtttaaataaggctagtccgttatcagcgtgttgccgaaaggcaacacgcggcaccgagtcggtgc

SEQ ID NO: 4069 - RNA, 88 nt, synthetic construct
  source 1..88: mol_type = other RNA
gtttaagagctagaaatagcaagtttaaataaggctagtccgttatcagcgttaaggcgaaagccttaacgcggcaccgagtcggtgc

SEQ ID NO: 4070 - RNA, 88 nt, synthetic construct
  source 1..88: mol_type = other RNA
gtttaagagctagaaatagcaagtttaaataaggctagtccgttatcagcgtctccgggaaaccggggacgcggcaccgagtcggtgc

SEQ ID NO: 4071 - RNA, 88 nt, synthetic construct
  source 1..88: mol_type = other RNA
gtttaagagctagaaatagcaagtttaaataaggctagtccgttatcagcgtctatcggaaacgatagacgcggcaccgagtcggtgc

SEQ ID NO: 4072 - RNA, 88 nt, synthetic construct
  source 1..88: mol_type = other RNA
gtttaagagctagaaatagcaagtttaaataaggctagtccgttatcagcgtcccggtgaaagccgggacgcggcaccgagtcggtgc

SEQ ID NO: 4073 - RNA, 88 nt, synthetic construct
  source 1..88: mol_type = other RNA
gtttaagagctagaaatagcaagtttaaataaggctagtccgttatcagcgtccctatgaaaatagggacgcggcaccgagtcggtgc

SEQ ID NO: 4074 - RNA, 88 nt, synthetic construct
  source 1..88: mol_type = other RNA
gtttaagagctagaaatagcaagtttaaataaggctagtccgttatcagcgtcaagcggaaacgcttgacgcggcaccgagtcggtgc

SEQ ID NO: 4075 - RNA, 88 nt, synthetic construct
  source 1..88: mol_type = other RNA
gtttaagagctagaaatagcaagtttaaataaggctagtccgttatcagcgtagggcggaaacgctctacgcggcaccgagtcggtgc

SEQ ID NO: 4076 - RNA, 88 nt, synthetic construct
  source 1..88: mol_type = other RNA
gtttaagagctagaaatagcaagtttaaataaggctagtccgttatcagcgtcctcgggaaaccggggacgcggcaccgagtcggtgc

SEQ ID NO: 4077 - RNA, 88 nt, synthetic construct
  source 1..88: mol_type = other RNA
gtttaagagctagaaatagcaagtttaaataaggctagtccgttatcagcgttccacggaaacgtggaacgcggcaccgagtcggtgc

SEQ ID NO: 4078 - RNA, 88 nt, synthetic construct
  source 1..88: mol_type = other RNA
gtttaagagctagaaatagcaagtttaaataaggctagtccgttatcagcgtgggatcgaaagatcccacgcggcaccgagtcggtgc

SEQ ID NO: 4079 - RNA, 88 nt, synthetic construct
  source 1..88: mol_type = other RNA
gtttaagagctagaaatagcaagtttaaataaggctagtccgttatcagcgtggtcttgaaagaggccacgcggcaccgagtcggtgc

SEQ ID NO: 4080 - RNA, 88 nt, synthetic construct
  source 1..88: mol_type = other RNA
gtttaagagctagaaatagcaagtttaaataaggctagtccgttatcagcgtgaggacgaaagttctcacgcggcaccgagtcggtgc

SEQ ID NO: 4081 - RNA, 88 nt, synthetic construct
  source 1..88: mol_type = other RNA
gtttaagagctagaaatagcaagtttaaataaggctagtccgttatcagcgtgccgcagaaatgcggtacgcggcaccgagtcggtgc

SEQ ID NO: 4082 - RNA, 88 nt, synthetic construct
  source 1..88: mol_type = other RNA
gtttaagagctagaaatagcaagtttaaataaggctagtccgttatcagcgtaagaccgaaaggtcttacgcggcaccgagtcggtgc

SEQ ID NO: 4083 - RNA, 88 nt, synthetic construct
  source 1..88: mol_type = other RNA
gtttaagagctagaaatagcaagtttaaataaggctagtccgttatcagcgttggaccgaaaggtccaacgcggcaccgagtcggtgc

SEQ ID NO: 4084 - RNA, 88 nt, synthetic construct
  source 1..88: mol_type = other RNA
gtttaagagctagaaatagcaagtttaaataaggctagtccgttatcagcgtcacgctgaaaggcgtgacgcggcaccgagtcggtgc

SEQ ID NO: 4085 - RNA, 88 nt, synthetic construct
  source 1..88: mol_type = other RNA
gtttaagagctagaaatagcaagtttaaataaggctagtccgttatcagcgtactcgagaaatcgagtacgcggcaccgagtcggtgc

SEQ ID NO: 4086 - RNA, 88 nt, synthetic construct
  source 1..88: mol_type = other RNA
gtttaagagctagaaatagcaagtttaaataaggctagtccgttatcagcgtccccgtgaaaacggggacgcggcaccgagtcggtgc

SEQ ID NO: 4087 - RNA, 88 nt, synthetic construct
  source 1..88: mol_type = other RNA
gtttaagagctagaaatagcaagtttaaataaggctagtccgttatcagcgtaccggagaaatccggtacgcggcaccgagtcggtgc

SEQ ID NO: 4088 - RNA, 88 nt, synthetic construct
  source 1..88: mol_type = other RNA
gtttaagagctagaaatagcaagtttaaataaggctagtccgttatcagcgttgggaagaaattcccaacgcggcaccgagtcggtgc

SEQ ID NO: 4089 - RNA, 88 nt, synthetic construct
  source 1..88: mol_type = other RNA
gtttaagagctagaaatagcaagtttaaataaggctagtccgttatcagcgtttggcggaaacgctagacgcggcaccgagtcggtgc

SEQ ID NO: 4090 - RNA, 88 nt, synthetic construct
  source 1..88: mol_type = other RNA
gtttaagagctagaaatagcaagtttaaataaggctagtccgttatcagcgtggctcagaaatgagtcacgcggcaccgagtcggtgc

SEQ ID NO: 4091 - RNA, 88 nt, synthetic construct
  source 1..88: mol_type = other RNA
gtttaagagctagaaatagcaagtttaaataaggctagtccgttatcagcgttcacgagaaatcgtgaacgcggcaccgagtcggtgc

SEQ ID NO: 4092 - RNA, 88 nt, synthetic construct
  source 1..88: mol_type = other RNA
gtttaagagctagaaatagcaagtttaaataaggctagtccgttatcagcgtccttacgaaagtaaggacgcggcaccgagtcggtgc

SEQ ID NO: 4093 - RNA, 88 nt, synthetic construct
  source 1..88: mol_type = other RNA
gtttaagagctagaaatagcaagtttaaataaggctagtccgttatcagcgtggtgaggaaactcaccacgcggcaccgagtcggtgc

SEQ ID NO: 4094 - RNA, 88 nt, synthetic construct
  source 1..88: mol_type = other RNA
gtttaagagctagaaatagcaagtttaaataaggctagtccgttatcagcgtgcactggaaacagtgcacgcggcaccgagtcggtgc

SEQ ID NO: 4095 - RNA, 88 nt, synthetic construct
  source 1..88: mol_type = other RNA
gtttaagagctagaaatagcaagtttaaataaggctagtccgttatcagcgtgctccagaaatggagcacgcggcaccgagtcggtgc

SEQ ID NO: 4096 - RNA, 88 nt, synthetic construct
  source 1..88: mol_type = other RNA
gtttaagagctagaaatagcaagtttaaataaggctagtccgttatcagcgtaggagagaaatctcctacgcggcaccgagtcggtgc

SEQ ID NO: 4097 - RNA, 88 nt, synthetic construct
  source 1..88: mol_type = other RNA
gtttaagagctagaaatagcaagtttaaataaggctagtccgttatcagcgtacagcggaaacgctgtacgcggcaccgagtcggtgc

SEQ ID NO: 4098 - RNA, 88 nt, synthetic construct
  source 1..88: mol_type = other RNA
gtttaagagctagaaatagcaagtttaaataaggctagtccgttatcagcgtgtagcggaaacgctacacgcggcaccgagtcggtgc

SEQ ID NO: 4099 - RNA, 88 nt, synthetic construct
  source 1..88: mol_type = other RNA
gtttaagagctagaaatagcaagtttaaataaggctagtccgttatcagcgtccccgggaaaccggggacgcggcaccgagtcggtgc

SEQ ID NO: 4100 - RNA, 88 nt, synthetic construct
  source 1..88: mol_type = other RNA
gtttaagagctagaaatagcaagtttaaataaggctagtccgttatcagcgtcatcctgaaaaggatgacgcggcaccgagtcggtgc

SEQ ID NO: 4101 - RNA, 88 nt, synthetic construct
  source 1..88: mol_type = other RNA
gtttaagagctagaaatagcaagtttaaataaggctagtccgttatcagcgttcctaggaaactaggaacgcggcaccgagtcggtgc

SEQ ID NO: 4102 - RNA, 88 nt, synthetic construct
  source 1..88: mol_type = other RNA
gtttaagagctagaaatagcaagtttaaataaggctagtccgttatcagcgtctgagcgaaagctcggacgcggcaccgagtcggtgc

SEQ ID NO: 4103 - RNA, 88 nt, synthetic construct
  source 1..88: mol_type = other RNA
gtttaagagctagaaatagcaagtttaaataaggctagtccgttatcagcgtcccttcgaaaggagggacgcggcaccgagtcggtgc

SEQ ID NO: 4104 - RNA, 88 nt, synthetic construct
  source 1..88: mol_type = other RNA
gtttaagagctagaaatagcaagtttaaataaggctagtccgttatcagcgtcacgcggaaacgcgtgacgcggcaccgagtcggtgc

SEQ ID NO: 4105 - RNA, 88 nt, synthetic construct
  source 1..88: mol_type = other RNA
gtttaagagctagaaatagcaagtttaaataaggctagtccgttatcagcgttcgctggaaacagtgaacgcggcaccgagtcggtgc

SEQ ID NO: 4106 - RNA, 88 nt, synthetic construct
  source 1..88: mol_type = other RNA
gtttaagagctagaaatagcaagtttaaataaggctagtccgttatcagcgtggtctcgaaagaggccacgcggcaccgagtcggtgc

SEQ ID NO: 4107 - RNA, 88 nt, synthetic construct
  source 1..88: mol_type = other RNA
gtttaagagctagaaatagcaagtttaaataaggctagtccgttatcagcgttccgtagaaatgcgggacgcggcaccgagtcggtgc

SEQ ID NO: 4108 - RNA, 88 nt, synthetic construct
  source 1..88: mol_type = other RNA
gtttaagagctagaaatagcaagtttaaataaggctagtccgttatcagcgtgtaccggaaacggtacacgcggcaccgagtcggtgc

SEQ ID NO: 4109 - RNA, 88 nt, synthetic construct
  source 1..88: mol_type = other RNA
gtttaagagctagaaatagcaagtttaaataaggctagtccgttatcagcgtagtctcgaaagggactacgcggcaccgagtcggtgc

SEQ ID NO: 4110 - RNA, 88 nt, synthetic construct
  source 1..88: mol_type = other RNA
gtttaagagctagaaatagcaagtttaaataaggctagtccgttatcagcgtggccttgaaaaaggtcacgcggcaccgagtcggtgc

SEQ ID NO: 4111 - RNA, 88 nt, synthetic construct
  source 1..88: mol_type = other RNA
gtttaagagctagaaatagcaagtttaaataaggctagtccgttatcagcgtgctccggaaacggggcacgcggcaccgagtcggtgc

SEQ ID NO: 4112 - RNA, 88 nt, synthetic construct
  source 1..88: mol_type = other RNA
gtttaagagctagaaatagcaagtttaaataaggctagtccgttatcagcgtctgtctgaaaaggcagacgcggcaccgagtcggtgc

SEQ ID NO: 4113 - RNA, 88 nt, synthetic construct
  source 1..88: mol_type = other RNA
gtttaagagctagaaatagcaagtttaaataaggctagtccgttatcagcgtgagcctgaaaaggctcacgcggcaccgagtcggtgc

SEQ ID NO: 4114 - RNA, 88 nt, synthetic construct
  source 1..88: mol_type = other RNA
gtttaagagctagaaatagcaagtttaaataaggctagtccgttatcagcgtgcctaggaaactgggcacgcggcaccgagtcggtgc

SEQ ID NO: 4115 - RNA, 88 nt, synthetic construct
  source 1..88: mol_type = other RNA
gtttaagagctagaaatagcaagtttaaataaggctagtccgttatcagcgttgagccgaaaggctcaacgcggcaccgagtcggtgc

SEQ ID NO: 4116 - RNA, 88 nt, synthetic construct
  source 1..88: mol_type = other RNA
gtttaagagctagaaatagcaagtttaaataaggctagtccgttatcagcgtagcagggaaacctgttacgcggcaccgagtcggtgc

SEQ ID NO: 4117 - RNA, 88 nt, synthetic construct
  source 1..88: mol_type = other RNA
gtttaagagctagaaatagcaagtttaaataaggctagtccgttatcagcgtgacactgaaaagtgtcacgcggcaccgagtcggtgc

SEQ ID NO: 4118 - RNA, 88 nt, synthetic construct
  source 1..88: mol_type = other RNA
gtttaagagctagaaatagcaagtttaaataaggctagtccgttatcagcgtccctcagaaatgagggacgcggcaccgagtcggtgc

SEQ ID NO: 4119 - RNA, 88 nt, synthetic construct
  source 1..88: mol_type = other RNA
gtttaagagctagaaatagcaagtttaaataaggctagtccgttatcagcgtgggttcgaaagaacctacgcggcaccgagtcggtgc

SEQ ID NO: 4120 - RNA, 88 nt, synthetic construct
  source 1..88: mol_type = other RNA
gtttaagagctagaaatagcaagtttaaataaggctagtccgttatcagcgtgtttcggaaacgaaacacgcggcaccgagtcggtgc

SEQ ID NO: 4121 - RNA, 88 nt, synthetic construct
  source 1..88: mol_type = other RNA
gtttaagagctagaaatagcaagtttaaataaggctagtccgttatcagcgttcttccgaaaggaagaacgcggcaccgagtcggtgc

SEQ ID NO: 4122 - RNA, 88 nt, synthetic construct
  source 1..88: mol_type = other RNA
gtttaagagctagaaatagcaagtttaaataaggctagtccgttatcagcgtatctccgaaaggggatacgcggcaccgagtcggtgc

SEQ ID NO: 4123 - RNA, 88 nt, synthetic construct
  source 1..88: mol_type = other RNA
gtttaagagctagaaatagcaagtttaaataaggctagtccgttatcagcgtacacacgaaagtgtgtacgcggcaccgagtcggtgc

SEQ ID NO: 4124 - RNA, 88 nt, synthetic construct
  source 1..88: mol_type = other RNA
gtttaagagctagaaatagcaagtttaaataaggctagtccgttatcagcgtggctttgaaaaaagccacgcggcaccgagtcggtgc

SEQ ID NO: 4125 - RNA, 88 nt, synthetic construct
  source 1..88: mol_type = other RNA
gtttaagagctagaaatagcaagtttaaataaggctagtccgttatcagcgtagagccgaaaggctttacgcggcaccgagtcggtgc

SEQ ID NO: 4126 - RNA, 88 nt, synthetic construct
  source 1..88: mol_type = other RNA
gtttaagagctagaaatagcaagtttaaataaggctagtccgttatcagcgtggtccagaaatggaccacgcggcaccgagtcggtgc

SEQ ID NO: 4127 - RNA, 88 nt, synthetic construct
  source 1..88: mol_type = other RNA
gtttaagagctagaaatagcaagtttaaataaggctagtccgttatcagcgttgcctagaaataggcaacgcggcaccgagtcggtgc

SEQ ID NO: 4128 - RNA, 88 nt, synthetic construct
  source 1..88: mol_type = other RNA
gtttaagagctagaaatagcaagtttaaataaggctagtccgttatcagcgtagcaacgaaagttgctacgcggcaccgagtcggtgc

SEQ ID NO: 4129 - RNA, 88 nt, synthetic construct
  source 1..88: mol_type = other RNA
gtttaagagctagaaatagcaagtttaaataaggctagtccgttatcagcgttggtcagaaatggccaacgcggcaccgagtcggtgc

SEQ ID NO: 4130 - RNA, 88 nt, synthetic construct
  source 1..88: mol_type = other RNA
gtttaagagctagaaatagcaagtttaaataaggctagtccgttatcagcgtccaagggaaactttggacgcggcaccgagtcggtgc

SEQ ID NO: 4131 - RNA, 88 nt, synthetic construct
  source 1..88: mol_type = other RNA
gtttaagagctagaaatagcaagtttaaataaggctagtccgttatcagcgtttccacgaaagtggaaacgcggcaccgagtcggtgc

SEQ ID NO: 4132 - RNA, 88 nt, synthetic construct
  source 1..88: mol_type = other RNA
gtttaagagctagaaatagcaagtttaaataaggctagtccgttatcagcgtgcgcgggaaaccgcgcacgcggcaccgagtcggtgc

SEQ ID NO: 4133 - RNA, 88 nt, synthetic construct
  source 1..88: mol_type = other RNA
gtttaagagctagaaatagcaagtttaaataaggctagtccgttatcagcgtccctgagaaattagggacgcggcaccgagtcggtgc

SEQ ID NO: 4134 - RNA, 88 nt, synthetic construct
  source 1..88: mol_type = other RNA
gtttaagagctagaaatagcaagtttaaataaggctagtccgttatcagcgtcacgtggaaacacgtgacgcggcaccgagtcggtgc

SEQ ID NO: 4135 - RNA, 88 nt, synthetic construct
  source 1..88: mol_type = other RNA
gtttaagagctagaaatagcaagtttaaataaggctagtccgttatcagcgtgccctcgaaagagggcacgcggcaccgagtcggtgc

SEQ ID NO: 4136 - RNA, 88 nt, synthetic construct
  source 1..88: mol_type = other RNA
gtttaagagctagaaatagcaagtttaaataaggctagtccgttatcagcgtgcgggtgaaagcctgcacgcggcaccgagtcggtgc

SEQ ID NO: 4137 - RNA, 88 nt, synthetic construct
  source 1..88: mol_type = other RNA
gtttaagagctagaaatagcaagtttaaataaggctagtccgttatcagcgtagcgcagaaatgcgctacgcggcaccgagtcggtgc

SEQ ID NO: 4138 - RNA, 88 nt, synthetic construct
  source 1..88: mol_type = other RNA
gtttaagagctagaaatagcaagtttaaataaggctagtccgttatcagcgtccaggggaaaccctggacgcggcaccgagtcggtgc

SEQ ID NO: 4139 - RNA, 88 nt, synthetic construct
  source 1..88: mol_type = other RNA
gtttaagagctagaaatagcaagtttaaataaggctagtccgttatcagcgtagccgagaaattggctacgcggcaccgagtcggtgc

SEQ ID NO: 4140 - RNA, 88 nt, synthetic construct
  source 1..88: mol_type = other RNA
gtttaagagctagaaatagcaagtttaaataaggctagtccgttatcagcgttacgcggaaacgcgtaacgcggcaccgagtcggtgc

SEQ ID NO: 4141 - RNA, 88 nt, synthetic construct
  source 1..88: mol_type = other RNA
gtttaagagctagaaatagcaagtttaaataaggctagtccgttatcagcgtacactcgaaagggtgtacgcggcaccgagtcggtgc

SEQ ID NO: 4142 - RNA, 88 nt, synthetic construct
  source 1..88: mol_type = other RNA
gtttaagagctagaaatagcaagtttaaataaggctagtccgttatcagcgtagtaccgaaaggtgctacgcggcaccgagtcggtgc

SEQ ID NO: 4143 - RNA, 88 nt, synthetic construct
  source 1..88: mol_type = other RNA
gtttaagagctagaaatagcaagtttaaataaggctagtccgttatcagcgttggggggaaacccccaacgcggcaccgagtcggtgc

SEQ ID NO: 4144 - RNA, 88 nt, synthetic construct
  source 1..88: mol_type = other RNA
gtttaagagctagaaatagcaagtttaaataaggctagtccgttatcagcgtggtggtgaaagccaccacgcggcaccgagtcggtgc

SEQ ID NO: 4145 - RNA, 88 nt, synthetic construct
  source 1..88: mol_type = other RNA
gtttaagagctagaaatagcaagtttaaataaggctagtccgttatcagcgtggggaggaaactctccacgcggcaccgagtcggtgc

SEQ ID NO: 4146 - RNA, 88 nt, synthetic construct
  source 1..88: mol_type = other RNA
gtttaagagctagaaatagcaagtttaaataaggctagtccgttatcagcgtgtttgggaaaccaaacacgcggcaccgagtcggtgc

SEQ ID NO: 4147 - RNA, 88 nt, synthetic construct
  source 1..88: mol_type = other RNA
gtttaagagctagaaatagcaagtttaaataaggctagtccgttatcagcgttccaacgaaagttggaacgcggcaccgagtcggtgc

SEQ ID NO: 4148 - RNA, 88 nt, synthetic construct
  source 1..88: mol_type = other RNA
gtttaagagctagaaatagcaagtttaaataaggctagtccgttatcagcgtgcgcgcgaaagcgcgtacgcggcaccgagtcggtgc

SEQ ID NO: 4149 - RNA, 88 nt, synthetic construct
  source 1..88: mol_type = other RNA
gtttaagagctagaaatagcaagtttaaataaggctagtccgttatcagcgtgctgtcgaaaggcagcacgcggcaccgagtcggtgc

SEQ ID NO: 4150 - RNA, 88 nt, synthetic construct
  source 1..88: mol_type = other RNA
gtttaagagctagaaatagcaagtttaaataaggctagtccgttatcagcgtctcgtcgaaagacgagacgcggcaccgagtcggtgc

SEQ ID NO: 4151 - RNA, 88 nt, synthetic construct
  source 1..88: mol_type = other RNA
gtttaagagctagaaatagcaagtttaaataaggctagtccgttatcagcgtgaccaggaaactggtcacgcggcaccgagtcggtgc

SEQ ID NO: 4152 - RNA, 88 nt, synthetic construct
  source 1..88: mol_type = other RNA
gtttaagagctagaaatagcaagtttaaataaggctagtccgttatcagcgtggtgtggaaacacgccacgcggcaccgagtcggtgc

SEQ ID NO: 4153 - RNA, 88 nt, synthetic construct
  source 1..88: mol_type = other RNA
gtttaagagctagaaatagcaagtttaaataaggctagtccgttatcagcgttttgccgaaaggcaaaacgcggcaccgagtcggtgc

SEQ ID NO: 4154 - RNA, 88 nt, synthetic construct
  source 1..88: mol_type = other RNA
gtttaagagctagaaatagcaagtttaaataaggctagtccgttatcagcgtagtgacgaaagtcactacgcggcaccgagtcggtgc

SEQ ID NO: 4155 - RNA, 88 nt, synthetic construct
  source 1..88: mol_type = other RNA
gtttaagagctagaaatagcaagtttaaataaggctagtccgttatcagcgtcctaaggaaacttaggacgcggcaccgagtcggtgc

SEQ ID NO: 4156 - RNA, 88 nt, synthetic construct
  source 1..88: mol_type = other RNA
gtttaagagctagaaatagcaagtttaaataaggctagtccgttatcagcgtggcctagaaataggctacgcggcaccgagtcggtgc

SEQ ID NO: 4157 - RNA, 88 nt, synthetic construct
  source 1..88: mol_type = other RNA
gtttaagagctagaaatagcaagtttaaataaggctagtccgttatcagcgtatgagcgaaagctcatacgcggcaccgagtcggtgc

SEQ ID NO: 4158 - RNA, 88 nt, synthetic construct
  source 1..88: mol_type = other RNA
gtttaagagctagaaatagcaagtttaaataaggctagtccgttatcagcgttggatcgaaagatccaacgcggcaccgagtcggtgc

SEQ ID NO: 4159 - RNA, 88 nt, synthetic construct
  source 1..88: mol_type = other RNA
gtttaagagctagaaatagcaagtttaaataaggctagtccgttatcagcgtgggcaagaaattgcccacgcggcaccgagtcggtgc

SEQ ID NO: 4160 - RNA, 90 nt, synthetic construct
  source 1..90: mol_type = other RNA
gtttaagagctagaaatagcaagtttaaataaggctagtccgttatcagcgttcgtcgcgaaagcgacgaacgcggcaccgagtcggtgc

SEQ ID NO: 4161 - RNA, 90 nt, synthetic construct
  source 1..90: mol_type = other RNA
gtttaagagctagaaatagcaagtttaaataaggctagtccgttatcagcgtggtgcgcgaaagcgcactacgcggcaccgagtcggtgc

SEQ ID NO: 4162 - RNA, 90 nt, synthetic construct
  source 1..90: mol_type = other RNA
gtttaagagctagaaatagcaagtttaaataaggctagtccgttatcagcgtggcacgggaaactgtgtcacgcggcaccgagtcggtgc

SEQ ID NO: 4163 - RNA, 90 nt, synthetic construct
  source 1..90: mol_type = other RNA
gtttaagagctagaaatagcaagtttaaataaggctagtccgttatcagcgtctaaggggaaacccttagacgcggcaccgagtcggtgc

SEQ ID NO: 4164 - RNA, 90 nt, synthetic construct
  source 1..90: mol_type = other RNA
gtttaagagctagaaatagcaagtttaaataaggctagtccgttatcagcgtagactcggaaacgagtctacgcggcaccgagtcggtgc

SEQ ID NO: 4165 - RNA, 90 nt, synthetic construct
  source 1..90: mol_type = other RNA
gtttaagagctagaaatagcaagtttaaataaggctagtccgttatcagcgtcgctgacgaaagtcggcgacgcggcaccgagtcggtgc

SEQ ID NO: 4166 - RNA, 90 nt, synthetic construct
  source 1..90: mol_type = other RNA
gtttaagagctagaaatagcaagtttaaataaggctagtccgttatcagcgtacagtcggaaacgactgtacgcggcaccgagtcggtgc

SEQ ID NO: 4167 - RNA, 90 nt, synthetic construct
  source 1..90: mol_type = other RNA
gtttaagagctagaaatagcaagtttaaataaggctagtccgttatcagcgttggcctggaaacaggccaacgcggcaccgagtcggtgc

SEQ ID NO: 4168 - RNA, 90 nt, synthetic construct
  source 1..90: mol_type = other RNA
gtttaagagctagaaatagcaagtttaaataaggctagtccgttatcagcgtgcccgtcgaaagacgggcacgcggcaccgagtcggtgc

SEQ ID NO: 4169 - RNA, 90 nt, synthetic construct
  source 1..90: mol_type = other RNA
gtttaagagctagaaatagcaagtttaaataaggctagtccgttatcagcgtccgggctgaaaggcccggacgcggcaccgagtcggtgc

SEQ ID NO: 4170 - RNA, 90 nt, synthetic construct
  source 1..90: mol_type = other RNA
gtttaagagctagaaatagcaagtttaaataaggctagtccgttatcagcgtcggcgtggaaatacgctgacgcggcaccgagtcggtgc

SEQ ID NO: 4171 - RNA, 90 nt, synthetic construct
  source 1..90: mol_type = other RNA
gtttaagagctagaaatagcaagtttaaataaggctagtccgttatcagcgtggggcacgaaagtgccccacgcggcaccgagtcggtgc

SEQ ID NO: 4172 - RNA, 90 nt, synthetic construct
  source 1..90: mol_type = other RNA
gtttaagagctagaaatagcaagtttaaataaggctagtccgttatcagcgtgggtccggaaatggacccacgcggcaccgagtcggtgc

SEQ ID NO: 4173 - RNA, 90 nt, synthetic construct
  source 1..90: mol_type = other RNA
gtttaagagctagaaatagcaagtttaaataaggctagtccgttatcagcgtcaacacggaaacgtgttgacgcggcaccgagtcggtgc

SEQ ID NO: 4174 - RNA, 90 nt, synthetic construct
  source 1..90: mol_type = other RNA
gtttaagagctagaaatagcaagtttaaataaggctagtccgttatcagcgttgtggctgaaaagccacaacgcggcaccgagtcggtgc

SEQ ID NO: 4175 - RNA, 90 nt, synthetic construct
  source 1..90: mol_type = other RNA
gtttaagagctagaaatagcaagtttaaataaggctagtccgttatcagcgtcgttaccgaaaggtaacgacgcggcaccgagtcggtgc

SEQ ID NO: 4176 - RNA, 90 nt, synthetic construct
  source 1..90: mol_type = other RNA
gtttaagagctagaaatagcaagtttaaataaggctagtccgttatcagcgtgcttagcgaaagctaggcacgcggcaccgagtcggtgc

SEQ ID NO: 4177 - RNA, 90 nt, synthetic construct
  source 1..90: mol_type = other RNA
gtttaagagctagaaatagcaagtttaaataaggctagtccgttatcagcgtaaccgcagaaatgcggttacgcggcaccgagtcggtgc

SEQ ID NO: 4178 - RNA, 90 nt, synthetic construct
  source 1..90: mol_type = other RNA
gtttaagagctagaaatagcaagtttaaataaggctagtccgttatcagcgtacactgggaaaccggtgtacgcggcaccgagtcggtgc

SEQ ID NO: 4179 - RNA, 90 nt, synthetic construct
  source 1..90: mol_type = other RNA
gtttaagagctagaaatagcaagtttaaataaggctagtccgttatcagcgtgcggggggaaatccccgcacgcggcaccgagtcggtgc

SEQ ID NO: 4180 - RNA, 90 nt, synthetic construct
  source 1..90: mol_type = other RNA
gtttaagagctagaaatagcaagtttaaataaggctagtccgttatcagcgttccgttcgaaaggacggaacgcggcaccgagtcggtgc

SEQ ID NO: 4181 - RNA, 90 nt, synthetic construct
  source 1..90: mol_type = other RNA
gtttaagagctagaaatagcaagtttaaataaggctagtccgttatcagcgtcctggccgaaaggccaggacgcggcaccgagtcggtgc

SEQ ID NO: 4182 - RNA, 90 nt, synthetic construct
  source 1..90: mol_type = other RNA
gtttaagagctagaaatagcaagtttaaataaggctagtccgttatcagcgtcaggaccgaaaggtcctgacgcggcaccgagtcggtgc

SEQ ID NO: 4183 - RNA, 90 nt, synthetic construct
  source 1..90: mol_type = other RNA
gtttaagagctagaaatagcaagtttaaataaggctagtccgttatcagcgtttccggagaaatccggggacgcggcaccgagtcggtgc

SEQ ID NO: 4184 - RNA, 90 nt, synthetic construct
  source 1..90: mol_type = other RNA
gtttaagagctagaaatagcaagtttaaataaggctagtccgttatcagcgtgagtcgagaaatcgactcacgcggcaccgagtcggtgc

SEQ ID NO: 4185 - RNA, 90 nt, synthetic construct
  source 1..90: mol_type = other RNA
gtttaagagctagaaatagcaagtttaaataaggctagtccgttatcagcgtccctgttgaaagacagggacgcggcaccgagtcggtgc

SEQ ID NO: 4186 - RNA, 90 nt, synthetic construct
  source 1..90: mol_type = other RNA
gtttaagagctagaaatagcaagtttaaataaggctagtccgttatcagcgtatcaccggaaacggtggtacgcggcaccgagtcggtgc

SEQ ID NO: 4187 - RNA, 90 nt, synthetic construct
  source 1..90: mol_type = other RNA
gtttaagagctagaaatagcaagtttaaataaggctagtccgttatcagcgtgacgctggaaacagcgtcacgcggcaccgagtcggtgc

SEQ ID NO: 4188 - RNA, 90 nt, synthetic construct
  source 1..90: mol_type = other RNA
gtttaagagctagaaatagcaagtttaaataaggctagtccgttatcagcgttcgcgcggaaacgcgcgaacgcggcaccgagtcggtgc

SEQ ID NO: 4189 - RNA, 90 nt, synthetic construct
  source 1..90: mol_type = other RNA
gtttaagagctagaaatagcaagtttaaataaggctagtccgttatcagcgtcgggatggaaacatcccgacgcggcaccgagtcggtgc

SEQ ID NO: 4190 - RNA, 90 nt, synthetic construct
  source 1..90: mol_type = other RNA
gtttaagagctagaaatagcaagtttaaataaggctagtccgttatcagcgtgtaccgcgaaagcggtgcacgcggcaccgagtcggtgc

SEQ ID NO: 4191 - RNA, 90 nt, synthetic construct
  source 1..90: mol_type = other RNA
gtttaagagctagaaatagcaagtttaaataaggctagtccgttatcagcgtccgcgctgaaaagcgcggacgcggcaccgagtcggtgc

SEQ ID NO: 4192 - RNA, 90 nt, synthetic construct
  source 1..90: mol_type = other RNA
gtttaagagctagaaatagcaagtttaaataaggctagtccgttatcagcgtgcgagaggaaactctcgtacgcggcaccgagtcggtgc

SEQ ID NO: 4193 - RNA, 90 nt, synthetic construct
  source 1..90: mol_type = other RNA
gtttaagagctagaaatagcaagtttaaataaggctagtccgttatcagcgtgacgctcgaaagagtgtcacgcggcaccgagtcggtgc

SEQ ID NO: 4194 - RNA, 90 nt, synthetic construct
  source 1..90: mol_type = other RNA
gtttaagagctagaaatagcaagtttaaataaggctagtccgttatcagcgtgtgcctcgaaagaggcatacgcggcaccgagtcggtgc

SEQ ID NO: 4195 - RNA, 90 nt, synthetic construct
  source 1..90: mol_type = other RNA
gtttaagagctagaaatagcaagtttaaataaggctagtccgttatcagcgtgcaacgggaaaccgttgcacgcggcaccgagtcggtgc

SEQ ID NO: 4196 - RNA, 90 nt, synthetic construct
  source 1..90: mol_type = other RNA
gtttaagagctagaaatagcaagtttaaataaggctagtccgttatcagcgtccgatcggaaacgatcggacgcggcaccgagtcggtgc

SEQ ID NO: 4197 - RNA, 90 nt, synthetic construct
  source 1..90: mol_type = other RNA
gtttaagagctagaaatagcaagtttaaataaggctagtccgttatcagcgtctgttgcgaaagcaacagacgcggcaccgagtcggtgc

SEQ ID NO: 4198 - RNA, 90 nt, synthetic construct
  source 1..90: mol_type = other RNA
gtttaagagctagaaatagcaagtttaaataaggctagtccgttatcagcgtgggattcgaaagaatcccacgcggcaccgagtcggtgc

SEQ ID NO: 4199 - RNA, 90 nt, synthetic construct
  source 1..90: mol_type = other RNA
gtttaagagctagaaatagcaagtttaaataaggctagtccgttatcagcgttacccaggaaactgggtaacgcggcaccgagtcggtgc

SEQ ID NO: 4200 - RNA, 90 nt, synthetic construct
  source 1..90: mol_type = other RNA
gtttaagagctagaaatagcaagtttaaataaggctagtccgttatcagcgtaccttccgaaaggaaggtacgcggcaccgagtcggtgc

SEQ ID NO: 4201 - RNA, 90 nt, synthetic construct
  source 1..90: mol_type = other RNA
gtttaagagctagaaatagcaagtttaaataaggctagtccgttatcagcgtctcggcagaaatgccgagacgcggcaccgagtcggtgc

SEQ ID NO: 4202 - RNA, 90 nt, synthetic construct
  source 1..90: mol_type = other RNA
gtttaagagctagaaatagcaagtttaaataaggctagtccgttatcagcgtctgagccgaaaggcttagacgcggcaccgagtcggtgc

SEQ ID NO: 4203 - RNA, 90 nt, synthetic construct
  source 1..90: mol_type = other RNA
gtttaagagctagaaatagcaagtttaaataaggctagtccgttatcagcgtggccctcgaaagagggccacgcggcaccgagtcggtgc

SEQ ID NO: 4204 - RNA, 90 nt, synthetic construct
  source 1..90: mol_type = other RNA
gtttaagagctagaaatagcaagtttaaataaggctagtccgttatcagcgtcgcaggagaaatcctgcgacgcggcaccgagtcggtgc

SEQ ID NO: 4205 - RNA, 90 nt, synthetic construct
  source 1..90: mol_type = other RNA
gtttaagagctagaaatagcaagtttaaataaggctagtccgttatcagcgttagccgtgaaaacggctaacgcggcaccgagtcggtgc

SEQ ID NO: 4206 - RNA, 90 nt, synthetic construct
  source 1..90: mol_type = other RNA
gtttaagagctagaaatagcaagtttaaataaggctagtccgttatcagcgtcaaggtggaaacaccttgacgcggcaccgagtcggtgc

SEQ ID NO: 4207 - RNA, 90 nt, synthetic construct
  source 1..90: mol_type = other RNA
gtttaagagctagaaatagcaagtttaaataaggctagtccgttatcagcgtccaaccggaaacggttggacgcggcaccgagtcggtgc

SEQ ID NO: 4208 - RNA, 90 nt, synthetic construct
  source 1..90: mol_type = other RNA
gtttaagagctagaaatagcaagtttaaataaggctagtccgttatcagcgtgcacgaggaaacttgtgcacgcggcaccgagtcggtgc

SEQ ID NO: 4209 - RNA, 90 nt, synthetic construct
  source 1..90: mol_type = other RNA
gtttaagagctagaaatagcaagtttaaataaggctagtccgttatcagcgtcgtgtgtgaaagcacacgacgcggcaccgagtcggtgc

SEQ ID NO: 4210 - RNA, 90 nt, synthetic construct
  source 1..90: mol_type = other RNA
gtttaagagctagaaatagcaagtttaaataaggctagtccgttatcagcgtctggtgcgaaagcaccagacgcggcaccgagtcggtgc

SEQ ID NO: 4211 - RNA, 90 nt, synthetic construct
  source 1..90: mol_type = other RNA
gtttaagagctagaaatagcaagtttaaataaggctagtccgttatcagcgttgtcagggaaacctgacaacgcggcaccgagtcggtgc

SEQ ID NO: 4212 - RNA, 90 nt, synthetic construct
  source 1..90: mol_type = other RNA
gtttaagagctagaaatagcaagtttaaataaggctagtccgttatcagcgtccgggatgaaaatcccggacgcggcaccgagtcggtgc

SEQ ID NO: 4213 - RNA, 90 nt, synthetic construct
  source 1..90: mol_type = other RNA
gtttaagagctagaaatagcaagtttaaataaggctagtccgttatcagcgtagatccggaaacggatctacgcggcaccgagtcggtgc

SEQ ID NO: 4214 - RNA, 90 nt, synthetic construct
  source 1..90: mol_type = other RNA
gtttaagagctagaaatagcaagtttaaataaggctagtccgttatcagcgtacttggcgaaagccaagtacgcggcaccgagtcggtgc

SEQ ID NO: 4215 - RNA, 90 nt, synthetic construct
  source 1..90: mol_type = other RNA
gtttaagagctagaaatagcaagtttaaataaggctagtccgttatcagcgtgatggccgaaaggccattacgcggcaccgagtcggtgc

SEQ ID NO: 4216 - RNA, 90 nt, synthetic construct
  source 1..90: mol_type = other RNA
gtttaagagctagaaatagcaagtttaaataaggctagtccgttatcagcgtccatcgcgaaagtggtggacgcggcaccgagtcggtgc

SEQ ID NO: 4217 - RNA, 90 nt, synthetic construct
  source 1..90: mol_type = other RNA
gtttaagagctagaaatagcaagtttaaataaggctagtccgttatcagcgtgacccccgaaagggggtcacgcggcaccgagtcggtgc

SEQ ID NO: 4218 - RNA, 90 nt, synthetic construct
  source 1..90: mol_type = other RNA
gtttaagagctagaaatagcaagtttaaataaggctagtccgttatcagcgtcggaacggaaacgttccgacgcggcaccgagtcggtgc

SEQ ID NO: 4219 - RNA, 90 nt, synthetic construct
  source 1..90: mol_type = other RNA
gtttaagagctagaaatagcaagtttaaataaggctagtccgttatcagcgttggagcggaaacgctccaacgcggcaccgagtcggtgc

SEQ ID NO: 4220 - RNA, 90 nt, synthetic construct
  source 1..90: mol_type = other RNA
gtttaagagctagaaatagcaagtttaaataaggctagtccgttatcagcgtacgttccgaaaggaacgtacgcggcaccgagtcggtgc

SEQ ID NO: 4221 - RNA, 90 nt, synthetic construct
  source 1..90: mol_type = other RNA
gtttaagagctagaaatagcaagtttaaataaggctagtccgttatcagcgtgtcgctagaaatagcgacacgcggcaccgagtcggtgc

SEQ ID NO: 4222 - RNA, 90 nt, synthetic construct
  source 1..90: mol_type = other RNA
gtttaagagctagaaatagcaagtttaaataaggctagtccgttatcagcgtgaagagcgaaagctcttcacgcggcaccgagtcggtgc

SEQ ID NO: 4223 - RNA, 90 nt, synthetic construct
  source 1..90: mol_type = other RNA
gtttaagagctagaaatagcaagtttaaataaggctagtccgttatcagcgtaagcggggaaactcgcttacgcggcaccgagtcggtgc

SEQ ID NO: 4224 - RNA, 90 nt, synthetic construct
  source 1..90: mol_type = other RNA
gtttaagagctagaaatagcaagtttaaataaggctagtccgttatcagcgtgctgttcgaaagggcagcacgcggcaccgagtcggtgc

SEQ ID NO: 4225 - RNA, 90 nt, synthetic construct
  source 1..90: mol_type = other RNA
gtttaagagctagaaatagcaagtttaaataaggctagtccgttatcagcgtggtccaggaaactgggctacgcggcaccgagtcggtgc

SEQ ID NO: 4226 - RNA, 90 nt, synthetic construct
  source 1..90: mol_type = other RNA
gtttaagagctagaaatagcaagtttaaataaggctagtccgttatcagcgtgcttccagaaatggaggcacgcggcaccgagtcggtgc

SEQ ID NO: 4227 - RNA, 90 nt, synthetic construct
  source 1..90: mol_type = other RNA
gtttaagagctagaaatagcaagtttaaataaggctagtccgttatcagcgtagccggtgaaaaccggctacgcggcaccgagtcggtgc

SEQ ID NO: 4228 - RNA, 90 nt, synthetic construct
  source 1..90: mol_type = other RNA
gtttaagagctagaaatagcaagtttaaataaggctagtccgttatcagcgtgacggcggaaacgccgtcacgcggcaccgagtcggtgc

SEQ ID NO: 4229 - RNA, 90 nt, synthetic construct
  source 1..90: mol_type = other RNA
gtttaagagctagaaatagcaagtttaaataaggctagtccgttatcagcgtcttcgccgaaaggcgaagacgcggcaccgagtcggtgc

SEQ ID NO: 4230 - RNA, 90 nt, synthetic construct
  source 1..90: mol_type = other RNA
gtttaagagctagaaatagcaagtttaaataaggctagtccgttatcagcgtctctcacgaaagtgagggacgcggcaccgagtcggtgc

SEQ ID NO: 4231 - RNA, 90 nt, synthetic construct
  source 1..90: mol_type = other RNA
gtttaagagctagaaatagcaagtttaaataaggctagtccgttatcagcgtagtaggcgaaagcctactacgcggcaccgagtcggtgc

SEQ ID NO: 4232 - RNA, 90 nt, synthetic construct
  source 1..90: mol_type = other RNA
gtttaagagctagaaatagcaagtttaaataaggctagtccgttatcagcgtcgggtcagaaatgacctgacgcggcaccgagtcggtgc

SEQ ID NO: 4233 - RNA, 90 nt, synthetic construct
  source 1..90: mol_type = other RNA
gtttaagagctagaaatagcaagtttaaataaggctagtccgttatcagcgttagctcggaaacgagctaacgcggcaccgagtcggtgc

SEQ ID NO: 4234 - RNA, 90 nt, synthetic construct
  source 1..90: mol_type = other RNA
gtttaagagctagaaatagcaagtttaaataaggctagtccgttatcagcgtgcgcccagaaatgggtgcacgcggcaccgagtcggtgc

SEQ ID NO: 4235 - RNA, 92 nt, synthetic construct
  source 1..92: mol_type = other RNA
gtttaagagctagaaatagcaagtttaaataaggctagtccgttatcagcgttcccacttgaaagagtgggaacgcggcaccgagtcggtgc

SEQ ID NO: 4236 - RNA, 92 nt, synthetic construct
  source 1..92: mol_type = other RNA
gtttaagagctagaaatagcaagtttaaataaggctagtccgttatcagcgtcgtcccccgaaagggggatgacgcggcaccgagtcggtgc

SEQ ID NO: 4237 - RNA, 92 nt, synthetic construct
  source 1..92: mol_type = other RNA
gtttaagagctagaaatagcaagtttaaataaggctagtccgttatcagcgttgcagggagaaatccctgcaacgcggcaccgagtcggtgc

SEQ ID NO: 4238 - RNA, 92 nt, synthetic construct
  source 1..92: mol_type = other RNA
gtttaagagctagaaatagcaagtttaaataaggctagtccgttatcagcgttcgccaaggaaatttggcggacgcggcaccgagtcggtgc

SEQ ID NO: 4239 - RNA, 92 nt, synthetic construct
  source 1..92: mol_type = other RNA
gtttaagagctagaaatagcaagtttaaataaggctagtccgttatcagcgttcggggccgaaaggccccgaacgcggcaccgagtcggtgc

SEQ ID NO: 4240 - RNA, 92 nt, synthetic construct
  source 1..92: mol_type = other RNA
gtttaagagctagaaatagcaagtttaaataaggctagtccgttatcagcgttcgggtgggaaactacctgaacgcggcaccgagtcggtgc

SEQ ID NO: 4241 - RNA, 92 nt, synthetic construct
  source 1..92: mol_type = other RNA
gtttaagagctagaaatagcaagtttaaataaggctagtccgttatcagcgttgcacctggaaacgggtgcgacgcggcaccgagtcggtgc

SEQ ID NO: 4242 - RNA, 92 nt, synthetic construct
  source 1..92: mol_type = other RNA
gtttaagagctagaaatagcaagtttaaataaggctagtccgttatcagcgtctctacgggaaactgtagagacgcggcaccgagtcggtgc

SEQ ID NO: 4243 - RNA, 92 nt, synthetic construct
  source 1..92: mol_type = other RNA
gtttaagagctagaaatagcaagtttaaataaggctagtccgttatcagcgtcgccgtctgaaaaggcggcgacgcggcaccgagtcggtgc

SEQ ID NO: 4244 - RNA, 92 nt, synthetic construct
  source 1..92: mol_type = other RNA
gtttaagagctagaaatagcaagtttaaataaggctagtccgttatcagcgttacgggatgaaaatcccgtaacgcggcaccgagtcggtgc

SEQ ID NO: 4245 - RNA, 92 nt, synthetic construct
  source 1..92: mol_type = other RNA
gtttaagagctagaaatagcaagtttaaataaggctagtccgttatcagcgtagctgccggaaacggcagctacgcggcaccgagtcggtgc

SEQ ID NO: 4246 - RNA, 92 nt, synthetic construct
  source 1..92: mol_type = other RNA
gtttaagagctagaaatagcaagtttaaataaggctagtccgttatcagcgtactggtctgaaaaggccagtacgcggcaccgagtcggtgc

SEQ ID NO: 4247 - RNA, 92 nt, synthetic construct
  source 1..92: mol_type = other RNA
gtttaagagctagaaatagcaagtttaaataaggctagtccgttatcagcgtcgctggcagaaatgtcagcgacgcggcaccgagtcggtgc

SEQ ID NO: 4248 - RNA, 92 nt, synthetic construct
  source 1..92: mol_type = other RNA
gtttaagagctagaaatagcaagtttaaataaggctagtccgttatcagcgtcctgtcctgaaaaggacaggacgcggcaccgagtcggtgc

SEQ ID NO: 4249 - RNA, 92 nt, synthetic construct
  source 1..92: mol_type = other RNA
gtttaagagctagaaatagcaagtttaaataaggctagtccgttatcagcgtataccgaggaaactcggtatacgcggcaccgagtcggtgc

SEQ ID NO: 4250 - RNA, 92 nt, synthetic construct
  source 1..92: mol_type = other RNA
gtttaagagctagaaatagcaagtttaaataaggctagtccgttatcagcgttaggtcgcgaaagcgacctaacgcggcaccgagtcggtgc

SEQ ID NO: 4251 - RNA, 92 nt, synthetic construct
  source 1..92: mol_type = other RNA
gtttaagagctagaaatagcaagtttaaataaggctagtccgttatcagcgtgctgaaacgaaagtttcggcacgcggcaccgagtcggtgc

SEQ ID NO: 4252 - RNA, 92 nt, synthetic construct
  source 1..92: mol_type = other RNA
gtttaagagctagaaatagcaagtttaaataaggctagtccgttatcagcgtacggcaaagaaatttgccgtacgcggcaccgagtcggtgc

SEQ ID NO: 4253 - RNA, 92 nt, synthetic construct
  source 1..92: mol_type = other RNA
gtttaagagctagaaatagcaagtttaaataaggctagtccgttatcagcgtgtgagcctgaaaaggctcatacgcggcaccgagtcggtgc

SEQ ID NO: 4254 - RNA, 92 nt, synthetic construct
  source 1..92: mol_type = other RNA
gtttaagagctagaaatagcaagtttaaataaggctagtccgttatcagcgtcggcaaaagaaattttgccgacgcggcaccgagtcggtgc

SEQ ID NO: 4255 - RNA, 92 nt, synthetic construct
  source 1..92: mol_type = other RNA
gtttaagagctagaaatagcaagtttaaataaggctagtccgttatcagcgtccgctagcgaaagttagcggacgcggcaccgagtcggtgc

SEQ ID NO: 4256 - RNA, 92 nt, synthetic construct
  source 1..92: mol_type = other RNA
gtttaagagctagaaatagcaagtttaaataaggctagtccgttatcagcgtccaccatcgaaagatggtggacgcggcaccgagtcggtgc

SEQ ID NO: 4257 - RNA, 92 nt, synthetic construct
  source 1..92: mol_type = other RNA
gtttaagagctagaaatagcaagtttaaataaggctagtccgttatcagcgtagtcctgggaaaccgggactacgcggcaccgagtcggtgc

SEQ ID NO: 4258 - RNA, 92 nt, synthetic construct
  source 1..92: mol_type = other RNA
gtttaagagctagaaatagcaagtttaaataaggctagtccgttatcagcgtcgcattacgaaagtaatgcgacgcggcaccgagtcggtgc

SEQ ID NO: 4259 - RNA, 92 nt, synthetic construct
  source 1..92: mol_type = other RNA
gtttaagagctagaaatagcaagtttaaataaggctagtccgttatcagcgtggtgacacgaaagtgtcatcacgcggcaccgagtcggtgc

SEQ ID NO: 4260 - RNA, 78 nt, synthetic construct
  source 1..78: mol_type = other RNA
gtttaagagcccggaaacgggcaagtttaaataaggctagtccgttatcaacttgaaaaagtggcaccgagtcggtgc

SEQ ID NO: 4261 - RNA, 78 nt, synthetic construct
  source 1..78: mol_type = other RNA
gtttaagagccccgaaaggggcaagtttaaataaggctagtccgttatcaacttgaaaaagtggcaccgagtcggtgc

SEQ ID NO: 4262 - RNA, 78 nt, synthetic construct
  source 1..78: mol_type = other RNA
gtttaagagccgggaaaccggcaagtttaaataaggctagtccgttatcaacttgaaaaagtggcaccgagtcggtgc

SEQ ID NO: 4263 - RNA, 78 nt, synthetic construct
  source 1..78: mol_type = other RNA
gtttaagagccgcgaaagcggcaagtttaaataaggctagtccgttatcaacttgaaaaagtggcaccgagtcggtgc

SEQ ID NO: 4264 - RNA, 78 nt, synthetic construct
  source 1..78: mol_type = other RNA
gtttaagagcggcgaaagccgcaagtttaaataaggctagtccgttatcaacttgaaaaagtggcaccgagtcggtgc

SEQ ID NO: 4265 - RNA, 78 nt, synthetic construct
  source 1..78: mol_type = other RNA
gtttaagagcgccgaaaggcgcaagtttaaataaggctagtccgttatcaacttgaaaaagtggcaccgagtcggtgc

SEQ ID NO: 4266 - RNA, 78 nt, synthetic construct
  source 1..78: mol_type = other RNA
gtttaagagcgcggaaacgcgcaagtttaaataaggctagtccgttatcaacttgaaaaagtggcaccgagtcggtgc

SEQ ID NO: 4267 - RNA, 78 nt, synthetic construct
  source 1..78: mol_type = other RNA
gtttaagagcggggaaacccgcaagtttaaataaggctagtccgttatcaacttgaaaaagtggcaccgagtcggtgc

SEQ ID NO: 4268 - RNA, 78 nt, synthetic construct
  source 1..78: mol_type = other RNA
gtttaagagcctggaaacaggcaagtttaaataaggctagtccgttatcaacttgaaaaagtggcaccgagtcggtgc

SEQ ID NO: 4269 - RNA, 78 nt, synthetic construct
  source 1..78: mol_type = other RNA
gtttaagagcgaggaaactcgcaagtttaaataaggctagtccgttatcaacttgaaaaagtggcaccgagtcggtgc

SEQ ID NO: 4270 - RNA, 78 nt, synthetic construct
  source 1..78: mol_type = other RNA
gtttaagagcgtcgaaagacgcaagtttaaataaggctagtccgttatcaacttgaaaaagtggcaccgagtcggtgc

SEQ ID NO: 4271 - RNA, 78 nt, synthetic construct
  source 1..78: mol_type = other RNA
gtttaagagcagcgaaagctgcaagtttaaataaggctagtccgttatcaacttgaaaaagtggcaccgagtcggtgc

SEQ ID NO: 4272 - RNA, 78 nt, synthetic construct; identical to SEQ ID NO: 4262
  source 1..78: mol_type = other RNA

SEQ ID NO: 4273 - RNA, 78 nt, synthetic construct
  source 1..78: mol_type = other RNA
gtttaagagccgtgaaaacggcaagtttaaataaggctagtccgttatcaacttgaaaaagtggcaccgagtcggtgc

SEQ ID NO: 4274 - RNA, 78 nt, synthetic construct
  source 1..78: mol_type = other RNA
gtttaagagctgggaaaccagcaagtttaaataaggctagtccgttatcaacttgaaaaagtggcaccgagtcggtgc

SEQ ID NO: 4275 - RNA, 78 nt, synthetic construct
  source 1..78: mol_type = other RNA
gtttaagagccctgaaaagggcaagtttaaataaggctagtccgttatcaacttgaaaaagtggcaccgagtcggtgc

SEQ ID NO: 4276 - RNA, 78 nt, synthetic construct
  source 1..78: mol_type = other RNA
gtttaagagcgacgaaagtcgcaagtttaaataaggctagtccgttatcaacttgaaaaagtggcaccgagtcggtgc

SEQ ID NO: 4277 - RNA, 78 nt, synthetic construct
  source 1..78: mol_type = other RNA
gtttaagagcggagaaatccgcaagtttaaataaggctagtccgttatcaacttgaaaaagtggcaccgagtcggtgc

SEQ ID NO: 4278 - RNA, 78 nt, synthetic construct
  source 1..78: mol_type = other RNA
gtttaagagcaccgaaaggtgcaagtttaaataaggctagtccgttatcaacttgaaaaagtggcaccgagtcggtgc

SEQ ID NO: 4279 - RNA, 78 nt, synthetic construct
  source 1..78: mol_type = other RNA
gtttaagagcagggaaacctgcaagtttaaataaggctagtccgttatcaacttgaaaaagtggcaccgagtcggtgc

SEQ ID NO: 4280 - RNA, 78 nt, synthetic construct
  source 1..78: mol_type = other RNA
gtttaagagcggggaaatccgcaagtttaaataaggctagtccgttatcaacttgaaaaagtggcaccgagtcggtgc

SEQ ID NO: 4281 - RNA, 78 nt, synthetic construct; identical to SEQ ID NO: 4263
  source 1..78: mol_type = other RNA

SEQ ID NO: 4282 - RNA, 78 nt, synthetic construct; identical to SEQ ID NO: 4261
  source 1..78: mol_type = other RNA

SEQ ID NO: 4283 - RNA, 78 nt, synthetic construct
  source 1..78: mol_type = other RNA
gtttaagagcctcgaaaggggcaagtttaaataaggctagtccgttatcaacttgaaaaagtggcaccgagtcggtgc

SEQ ID NO: 4284 - RNA, 78 nt, synthetic construct; identical to SEQ ID NO: 4267
  source 1..78: mol_type = other RNA

SEQ ID NO: 4285 - RNA, 78 nt, synthetic construct; identical to SEQ ID NO: 4266
  source 1..78: mol_type = other RNA

SEQ ID NO: 4286 - RNA, 78 nt, synthetic construct
  source 1..78: mol_type = other RNA
gtttaagagctgcgaaagcagcaagtttaaataaggctagtccgttatcaacttgaaaaagtggcaccgagtcggtgc

SEQ ID NO: 4287 - RNA, 78 nt, synthetic construct
  source 1..78: mol_type = other RNA
gtttaagagcacggaaacgtgcaagtttaaataaggctagtccgttatcaacttgaaaaagtggcaccgagtcggtgc

SEQ ID NO: 4288 - RNA, 78 nt, synthetic construct
  source 1..78: mol_type = other RNA
gtttaagagcgtggaaacacgcaagtttaaataaggctagtccgttatcaacttgaaaaagtggcaccgagtcggtgc

SEQ ID NO: 4289 - RNA, 78 nt, synthetic construct; identical to SEQ ID NO: 4265
  source 1..78: mol_type = other RNA

SEQ ID NO: 4290 - RNA, 78 nt, synthetic construct
  source 1..78: mol_type = other RNA
gtttaagagctccgaaaggggcaagtttaaataaggctagtccgttatcaacttgaaaaagtggcaccgagtcggtgc

SEQ ID NO: 4291 - RNA, 78 nt, synthetic construct; identical to SEQ ID NO: 4264
  source 1..78: mol_type = other RNA

SEQ ID NO: 4292 - RNA, 80 nt, synthetic construct
  source 1..80: mol_type = other RNA
gtttaagagccaccgaaaggtggcaagtttaaataaggctagtccgttatcaacttgaaaaagtggcaccgagtcggtgc

SEQ ID NO: 4293 - RNA, 80 nt, synthetic construct
  source 1..80: mol_type = other RNA
gtttaagagccgtcgaaagacggcaagtttaaataaggctagtccgttatcaacttgaaaaagtggcaccgagtcggtgc

SEQ ID NO: 4294 - RNA, 80 nt, synthetic construct
  source 1..80: mol_type = other RNA
gtttaagagccagcgaaagctggcaagtttaaataaggctagtccgttatcaacttgaaaaagtggcaccgagtcggtgc

SEQ ID NO: 4295 - RNA, 80 nt, synthetic construct
  source 1..80: mol_type = other RNA
gtttaagagcgcgggaaaccgcgcaagtttaaataaggctagtccgttatcaacttgaaaaagtggcaccgagtcggtgc

SEQ ID NO: 4296 - RNA, 80 nt, synthetic construct
  source 1..80: mol_type = other RNA
gtttaagagctcgcgaaagcgagcaagtttaaataaggctagtccgttatcaacttgaaaaagtggcaccgagtcggtgc

SEQ ID NO: 4297 - RNA, 80 nt, synthetic construct
  source 1..80: mol_type = other RNA
gtttaagagctcgggaaaccgagcaagtttaaataaggctagtccgttatcaacttgaaaaagtggcaccgagtcggtgc

SEQ ID NO: 4298 - RNA, 80 nt, synthetic construct
  source 1..80: mol_type = other RNA
gtttaagagcccctgaaagggggcaagtttaaataaggctagtccgttatcaacttgaaaaagtggcaccgagtcggtgc

SEQ ID NO: 4299 - RNA, 80 nt, synthetic construct
  source 1..80: mol_type = other RNA
gtttaagagccgtggaaacgcggcaagtttaaataaggctagtccgttatcaacttgaaaaagtggcaccgagtcggtgc

SEQ ID NO: 4300 - RNA, 80 nt, synthetic construct
  source 1..80: mol_type = other RNA
gtttaagagcgaccgaaaggtcgcaagtttaaataaggctagtccgttatcaacttgaaaaagtggcaccgagtcggtgc

SEQ ID NO: 4301 - RNA, 80 nt, synthetic construct
  source 1..80: mol_type = other RNA
gtttaagagcacgcgaaagcgtgcaagtttaaataaggctagtccgttatcaacttgaaaaagtggcaccgagtcggtgc

SEQ ID NO: 4302 - RNA, 80 nt, synthetic construct
  source 1..80: mol_type = other RNA
gtttaagagcgagcgaaagctcgcaagtttaaataaggctagtccgttatcaacttgaaaaagtggcaccgagtcggtgc

SEQ ID NO: 4303 - RNA, 80 nt, synthetic construct
  source 1..80: mol_type = other RNA
gtttaagagctccggaaacggagcaagtttaaataaggctagtccgttatcaacttgaaaaagtggcaccgagtcggtgc

SEQ ID NO: 4304 - RNA, 80 nt, synthetic construct
  source 1..80: mol_type = other RNA
gtttaagagcgccagaaatggcgcaagtttaaataaggctagtccgttatcaacttgaaaaagtggcaccgagtcggtgc

SEQ ID NO: 4305 - RNA, 80 nt, synthetic construct
  source 1..80: mol_type = other RNA
gtttaagagcccgtgaaaacgggcaagtttaaataaggctagtccgttatcaacttgaaaaagtggcaccgagtcggtgc

SEQ ID NO: 4306 - RNA, 80 nt, synthetic construct
  source 1..80: mol_type = other RNA
gtttaagagcgtgcgaaagcacgcaagtttaaataaggctagtccgttatcaacttgaaaaagtggcaccgagtcggtgc

SEQ ID NO: 4307 - RNA, 80 nt, synthetic construct
  source 1..80: mol_type = other RNA
gtttaagagctgccgaaaggcggcaagtttaaataaggctagtccgttatcaacttgaaaaagtggcaccgagtcggtgc

SEQ ID NO: 4308 - RNA, 80 nt, synthetic construct
  source 1..80: mol_type = other RNA
gtttaagagccctggaaacagggcaagtttaaataaggctagtccgttatcaacttgaaaaagtggcaccgagtcggtgc

SEQ ID NO: 4309 - RNA, 80 nt, synthetic construct
  source 1..80: mol_type = other RNA
gtttaagagcgctcgaaagggcgcaagtttaaataaggctagtccgttatcaacttgaaaaagtggcaccgagtcggtgc

SEQ ID NO: 4310 - RNA, 80 nt, synthetic construct
  source 1..80: mol_type = other RNA
gtttaagagcgcccgaaagggtgcaagtttaaataaggctagtccgttatcaacttgaaaaagtggcaccgagtcggtgc

SEQ ID NO: 4311 - RNA, 80 nt, synthetic construct
  source 1..80: mol_type = other RNA
gtttaagagctggggaaacccggcaagtttaaataaggctagtccgttatcaacttgaaaaagtggcaccgagtcggtgc

SEQ ID NO: 4312 - RNA, 80 nt, synthetic construct
  source 1..80: mol_type = other RNA
gtttaagagcggtcgaaaggccgcaagtttaaataaggctagtccgttatcaacttgaaaaagtggcaccgagtcggtgc

SEQ ID NO: 4313 - RNA, 80 nt, synthetic construct
  source 1..80: mol_type = other RNA
gtttaagagcaggcgaaagcctgcaagtttaaataaggctagtccgttatcaacttgaaaaagtggcaccgagtcggtgc

SEQ ID NO: 4314 - RNA, 80 nt, synthetic construct
  source 1..80: mol_type = other RNA
gtttaagagcgtgggaaaccgcgcaagtttaaataaggctagtccgttatcaacttgaaaaagtggcaccgagtcggtgc

SEQ ID NO: 4315 - RNA, 80 nt, synthetic construct
  source 1..80: mol_type = other RNA
gtttaagagcgctggaaacagcgcaagtttaaataaggctagtccgttatcaacttgaaaaagtggcaccgagtcggtgc

SEQ ID NO: 4316 - RNA, 80 nt, synthetic construct
  source 1..80: mol_type = other RNA
gtttaagagcctgggaaaccaggcaagtttaaataaggctagtccgttatcaacttgaaaaagtggcaccgagtcggtgc

SEQ ID NO: 4317 - RNA, 80 nt, synthetic construct
  source 1..80: mol_type = other RNA
gtttaagagccgcagaaatgcggcaagtttaaataaggctagtccgttatcaacttgaaaaagtggcaccgagtcggtgc

SEQ ID NO: 4318 - RNA, 80 nt, synthetic construct
  source 1..80: mol_type = other RNA
gtttaagagcccgggaaaccgggcaagtttaaataaggctagtccgttatcaacttgaaaaagtggcaccgagtcggtgc

SEQ ID NO: 4319 - RNA, 80 nt, synthetic construct
  source 1..80: mol_type = other RNA
gtttaagagcccgcgaaagcgggcaagtttaaataaggctagtccgttatcaacttgaaaaagtggcaccgagtcggtgc

SEQ ID NO: 4320 - RNA, 80 nt, synthetic construct
  source 1..80: mol_type = other RNA
gtttaagagcagccgaaaggctgcaagtttaaataaggctagtccgttatcaacttgaaaaagtggcaccgagtcggtgc

SEQ ID NO: 4321 - RNA, 80 nt, synthetic construct
  source 1..80: mol_type = other RNA
gtttaagagctgccgaaaggcagcaagtttaaataaggctagtccgttatcaacttgaaaaagtggcaccgagtcggtgc

SEQ ID NO: 4322 - RNA, 80 nt, synthetic construct
  source 1..80: mol_type = other RNA
gtttaagagcggacgaaagtccgcaagtttaaataaggctagtccgttatcaacttgaaaaagtggcaccgagtcggtgc

SEQ ID NO: 4323 - RNA, 80 nt, synthetic construct
  source 1..80: mol_type = other RNA
gtttaagagcccaggaaactgggcaagtttaaataaggctagtccgttatcaacttgaaaaagtggcaccgagtcggtgc

SEQ ID NO: 4324 - RNA, 82 nt, synthetic construct
  source 1..82: mol_type = other RNA
gtttaagagcgcgtggaaacatgcgcaagtttaaataaggctagtccgttatcaacttgaaaaagtggcaccgagtcggtgc

SEQ ID NO: 4325 - RNA, 82 nt, synthetic construct
  source 1..82: mol_type = other RNA
gtttaagagcctcccgaaaggggggcaagtttaaataaggctagtccgttatcaacttgaaaaagtggcaccgagtcggtgc

SEQ ID NO: 4326 - RNA, 82 nt, synthetic construct
  source 1..82: mol_type = other RNA
gtttaagagcgccatgaaaatggcgcaagtttaaataaggctagtccgttatcaacttgaaaaagtggcaccgagtcggtgc

SEQ ID NO: 4327 - RNA, 82 nt, synthetic construct
  source 1..82: mol_type = other RNA
gtttaagagcgcaacgaaagttgcgcaagtttaaataaggctagtccgttatcaacttgaaaaagtggcaccgagtcggtgc

SEQ ID NO: 4328 - RNA, 82 nt, synthetic construct
  source 1..82: mol_type = other RNA
gtttaagagccctgagaaatcagggcaagtttaaataaggctagtccgttatcaacttgaaaaagtggcaccgagtcggtgc

SEQ ID NO: 4329 - RNA, 82 nt, synthetic construct
  source 1..82: mol_type = other RNA
gtttaagagcctccagaaatggaggcaagtttaaataaggctagtccgttatcaacttgaaaaagtggcaccgagtcggtgc

SEQ ID NO: 4330 - RNA, 82 nt, synthetic construct
  source 1..82: mol_type = other RNA
gtttaagagcgcacagaaatgtgcgcaagtttaaataaggctagtccgttatcaacttgaaaaagtggcaccgagtcggtgc

SEQ ID NO: 4331 - RNA, 82 nt, synthetic construct
  source 1..82: mol_type = other RNA
gtttaagagcgaagcgaaagcttcgcaagtttaaataaggctagtccgttatcaacttgaaaaagtggcaccgagtcggtgc

SEQ ID NO: 4332 - RNA, 82 nt, synthetic construct
  source 1..82: mol_type = other RNA
gtttaagagcgcctcgaaagaggcgcaagtttaaataaggctagtccgttatcaacttgaaaaagtggcaccgagtcggtgc

SEQ ID NO: 4333 - RNA, 82 nt, synthetic construct
  source 1..82: mol_type = other RNA
gtttaagagcccggggaaactcgggcaagtttaaataaggctagtccgttatcaacttgaaaaagtggcaccgagtcggtgc

SEQ ID NO: 4334 - RNA, 82 nt, synthetic construct
  source 1..82: mol_type = other RNA
gtttaagagcgtctggaaacagacgcaagtttaaataaggctagtccgttatcaacttgaaaaagtggcaccgagtcggtgc

SEQ ID NO: 4335 - RNA, 82 nt, synthetic construct
  source 1..82: mol_type = other RNA
gtttaagagcgcagggaaacctgtgcaagtttaaataaggctagtccgttatcaacttgaaaaagtggcaccgagtcggtgc

SEQ ID NO: 4336 - RNA, 82 nt, synthetic construct
  source 1..82: mol_type = other RNA
gtttaagagccgcccgaaagggcggcaagtttaaataaggctagtccgttatcaacttgaaaaagtggcaccgagtcggtgc

SEQ ID NO: 4337 - RNA, 82 nt, synthetic construct
  source 1..82: mol_type = other RNA
gtttaagagccccgcgaaagcggggcaagtttaaataaggctagtccgttatcaacttgaaaaagtggcaccgagtcggtgc

SEQ ID NO: 4338 - RNA, 82 nt, synthetic construct
  source 1..82: mol_type = other RNA
gtttaagagctggcagaaatgccagcaagtttaaataaggctagtccgttatcaacttgaaaaagtggcaccgagtcggtgc

SEQ ID NO: 4339 - RNA, 82 nt, synthetic construct
  source 1..82: mol_type = other RNA
gtttaagagcgccttgaaaaaggcgcaagtttaaataaggctagtccgttatcaacttgaaaaagtggcaccgagtcggtgc

SEQ ID NO: 4340 - RNA, 82 nt, synthetic construct
  source 1..82: mol_type = other RNA
gtttaagagcgccaggaaactggcgcaagtttaaataaggctagtccgttatcaacttgaaaaagtggcaccgagtcggtgc

SEQ ID NO: 4341 - RNA, 82 nt, synthetic construct
  source 1..82: mol_type = other RNA
gtttaagagcccgcggaaacgcgggcaagtttaaataaggctagtccgttatcaacttgaaaaagtggcaccgagtcggtgc

SEQ ID NO: 4342 - RNA, 82 nt, synthetic construct
  source 1..82: mol_type = other RNA
gtttaagagccggccgaaaggccggcaagtttaaataaggctagtccgttatcaacttgaaaaagtggcaccgagtcggtgc

SEQ ID NO: 4343 - RNA, 82 nt, synthetic construct
  source 1..82: mol_type = other RNA
gtttaagagcccatggaaacatgggcaagtttaaataaggctagtccgttatcaacttgaaaaagtggcaccgagtcggtgc

SEQ ID NO: 4344 - RNA, 82 nt, synthetic construct
  source 1..82: mol_type = other RNA
gtttaagagcaaccggaaacggttgcaagtttaaataaggctagtccgttatcaacttgaaaaagtggcaccgagtcggtgc

SEQ ID NO: 4345 - RNA, 82 nt, synthetic construct
  source 1..82: mol_type = other RNA
gtttaagagcgttcggaaacgaacgcaagtttaaataaggctagtccgttatcaacttgaaaaagtggcaccgagtcggtgc

SEQ ID NO: 4346 - RNA, 82 nt, synthetic construct
  source 1..82: mol_type = other RNA
gtttaagagcgaggcgaaagtctcgcaagtttaaataaggctagtccgttatcaacttgaaaaagtggcaccgagtcggtgc

SEQ ID NO: 4347 - RNA, 82 nt, synthetic construct
  source 1..82: mol_type = other RNA
gtttaagagcccgaggaaactcgggcaagtttaaataaggctagtccgttatcaacttgaaaaagtggcaccgagtcggtgc

SEQ ID NO: 4348 - RNA, 82 nt, synthetic construct
  source 1..82: mol_type = other RNA
gtttaagagccgcaggaaactgcggcaagtttaaataaggctagtccgttatcaacttgaaaaagtggcaccgagtcggtgc

SEQ ID NO: 4349 - RNA, 82 nt, synthetic construct
  source 1..82: mol_type = other RNA
gtttaagagctccacgaaagtggagcaagtttaaataaggctagtccgttatcaacttgaaaaagtggcaccgagtcggtgc

SEQ ID NO: 4350 - RNA, 76 nt, synthetic construct; identical to SEQ ID NO: 16
  source 1..76: mol_type = other RNA

SEQ ID NO: 4351 - RNA, 78 nt, synthetic construct
  source 1..78: mol_type = other RNA
gttttagagcgcggaaacgcgcaagttaaaataaggctagtccgttatcaacttgaaaaagtggcaccgagtcggtgc

SEQ ID NO: 4352 - RNA, 78 nt, synthetic construct; identical to SEQ ID NO: 4266
  source 1..78: mol_type = other RNA

SEQ ID NO: 4353 - RNA, 76 nt, synthetic construct; identical to SEQ ID NO: 20
  source 1..76: mol_type = other RNA

SEQ ID NO: 4354 - RNA, 86 nt, synthetic construct; identical to SEQ ID NO: 24
  source 1..86: mol_type = other RNA

SEQ ID NO: 4355 - RNA, 76 nt, synthetic construct; identical to SEQ ID NO: 25
  source 1..76: mol_type = other RNA

SEQ ID NO: 4356 - RNA, 86 nt, synthetic construct
  source 1..86: mol_type = other RNA
gtttaagagctatgctggaaacagcatagcaagtttaaataaggctagtccgttatcagcgtgaaaacgcggcaccgagtcggtgc

SEQ ID NO: 4357 - RNA, 76 nt, synthetic construct
  source 1..76: mol_type = other RNA
gtttaagagctagaaatagcaagtttaaataaggctagtccgttaacaacttgaaaaagtggcaccgagtcggtgc

SEQ ID NO: 4358 - RNA, 76 nt, synthetic construct
  source 1..76: mol_type = other RNA
gtttgagagctagaaatagcaagttcaaataaggctagtccgttatcaacttgaaaaagtggcaccgagtcggtgc

SEQ ID NO: 4359 - RNA, 76 nt, synthetic construct
  source 1..76: mol_type = other RNA
gtttcagagctagaaatagcaagttgaaataaggctagtccgttatcaacttgaaaaagtggcaccgagtcggtgc

SEQ ID NO: 4360 - RNA, 116 nt, synthetic construct
  source 1..116: mol_type = other RNA
gtttggtgactgccacgcccagtttaagagctagaaatagcaagtttaaataaggctagtccgttatcagcgtgaaacaccccttgggcgtggcaaacgcggcaccgagtcggtgc

SEQ ID NO: 4361 - RNA, 118 nt, synthetic construct
  source 1..118: mol_type = other RNA
gtttggtgactgccacgcccagtttaagagctagaaatagcaagtttaaataaggctagtccgttatcagcgtgaaacaccccttgggcgtggccaaaacgcggcaccgagtcggtgc

SEQ ID NO: 4362 - RNA, 120 nt, synthetic construct
  source 1..120: mol_type = other RNA
gtttggtgactgccacgcccagtttaagagctagaaatagcaagtttaaataaggctagtccgttatcagcgtgaaacaccccttgggcgtggccctaaaacgcggcaccgagtcggtgc

SEQ ID NO: 4363 - RNA, 122 nt, synthetic construct
  source 1..122: mol_type = other RNA
gtttggtgactgccacgcccagtttaagagctagaaatagcaagtttaaataaggctagtccgttatcagcgtgaaacaccccttgggcgtggcggcctaaaacgcggcaccgagtcggtgc

SEQ ID NO: 4364 - RNA, 124 nt, synthetic construct
  source 1..124: mol_type = other RNA
gtttggtgactgccacgcccagtttaagagctagaaatagcaagtttaaataaggctagtccgttatcagcgtgaaacaccccttgggcgtggcggcctgggaaacgcggcaccgagtcggtgc

SEQ ID NO: 4365 - RNA, 122 nt, synthetic construct
  source 1..122: mol_type = other RNA
gtttggtgactgccacgcccagtttaagagctagaaatagcaagtttaaataaggctagtccgttatcagcgtgaaacaccccttgggcgtggcagtcacaaacgcggcaccgagtcggtgc

SEQ ID NO: 4366 - RNA, 124 nt, synthetic construct
  source 1..124: mol_type = other RNA
gtttggtgactgccacgcccagtttaagagctagaaatagcaagtttaaataaggctagtccgttatcagcgtgaaacaccccttgggcgtggcagtcacagaaacgcggcaccgagtcggtgc

SEQ ID NO: 4367 - RNA, 126 nt, synthetic construct
  source 1..126: mol_type = other RNA
gtttggtgactgccacgcccagtttaagagctagaaatagcaagtttaaataaggctagtccgttatcagcgtgaaacaccccttgggcgtggcagtcacaggaaaacgcggcaccgagtcggtgc

SEQ ID NO: 4368 - RNA, 128 nt, synthetic construct
  source 1..128: mol_type = other RNA
gtttggtgactgccacgcccagtttaagagctagaaatagcaagtttaaataaggctagtccgttatcagcgtgaaacaccccttgggcgtggcagtcacacagaaaaacgcggcaccgagtcggtgc

SEQ ID NO: 4369 - RNA, 130 nt, synthetic construct
  source 1..130: mol_type = other RNA
gtttggtgactgccacgcccagtttaagagctagaaatagcaagtttaaataaggctagtccgttatcagcgtgaaacaccccttgggcgtggcagtcaccaggttcaaaacgcggcaccgagtcggtgc

SEQ ID NO: 4370 - RNA, 124 nt, synthetic construct
  source 1..124: mol_type = other RNA
gttgccaagtgttccagccacgtttaagagctagaaatagcaagtttaaataaggctagtccgttatcagcgtgattgccctgggccggtggctggaacactaaacgcggcaccgagtcggtgc

SEQ ID NO: 4371 - RNA, 126 nt, synthetic construct
  source 1..126: mol_type = other RNA
gttgccaagtgttccagccacgtttaagagctagaaatagcaagtttaaataaggctagtccgttatcagcgtgattgccctgggccggtggctggaacactccaaacgcggcaccgagtcggtgc

SEQ ID NO: 4372 - RNA, 128 nt, synthetic construct
  source 1..128: mol_type = other RNA
gttgccaagtgttccagccacgtttaagagctagaaatagcaagtttaaataaggctagtccgttatcagcgtgattgccctgggccggtggctggaacactcaccaaacgcggcaccgagtcggtgc

SEQ ID NO: 4373 - RNA, 130 nt, synthetic construct
  source 1..130: mol_type = other RNA
gttgccaagtgttccagccacgtttaagagctagaaatagcaagtttaaataaggctagtccgttatcagcgtgattgccctgggccggtggctggaacactcctcataaacgcggcaccgagtcggtgc

SEQ ID NO: 4374 - RNA, 132 nt, synthetic construct
  source 1..132: mol_type = other RNA
gttgccaagtgttccagccacgtttaagagctagaaatagcaagtttaaataaggctagtccgttatcagcgtgattgccctgggccggtggctggaacactcctcactcaaacgcggcaccgagtcggtgc

SEQ ID NO: 4375 - RNA, 123 nt, synthetic construct
  source 1..123: mol_type = other RNA
gttgccaagtgttccagccacgtttaagagctagaaatagcaagtttaaataaggctagtccgttatcagcgtgagccctgggccggtggctggaacacttaaacgcggcaccgagtcggtgc

SEQ ID NO: 4376 - RNA, 125 nt, synthetic construct
  source 1..125: mol_type = other RNA
gttgccaagtgttccagccacgtttaagagctagaaatagcaagtttaaataaggctagtccgttatcagcgtgagccctgggccggtggctggaacacttaaaaacgcggcaccgagtcggtgc

SEQ ID NO: 4377 - RNA, 127 nt, synthetic construct
  source 1..127: mol_type = other RNA
gttgccaagtgttccagccacgtttaagagctagaaatagcaagtttaaataaggctagtccgttatcagcgtgagccctgggccggtggctggaacactttcctaaacgcggcaccgagtcggtgc

SEQ ID NO: 4378 - RNA, 129 nt, synthetic construct
  source 1..129: mol_type = other RNA
gttgccaagtgttccagccacgtttaagagctagaaatagcaagtttaaataaggctagtccgttatcagcgtgagccctgggccggtggctggaacactttcagagaaacgcggcaccgagtcggtgc

SEQ ID NO: 4379 - RNA, 131 nt, synthetic construct
  source 1..131: mol_type = other RNA
gttgccaagtgttccagccacgtttaagagctagaaatagcaagtttaaataaggctagtccgttatcagcgtgagccctgggccggtggctggaacactttaaaatttaaacgcggcaccgagtcggtgc

SEQ ID NO: 4380 - RNA, 121 nt, synthetic construct
  source 1..121: mol_type = other RNA
gtcaccaggaacatgtacctggtttaagagctagaaatagcaagtttaaataaggctagtccgttatcagcgtgattcccccaggtgtacatgttcctgaaacgcggcaccgagtcggtgc

SEQ ID NO: 4381 - RNA, 123 nt, synthetic construct
  source 1..123: mol_type = other RNA
gtcaccaggaacatgtacctggtttaagagctagaaatagcaagtttaaataaggctagtccgttatcagcgtgattcccccaggtgtacatgttcctgctaaacgcggcaccgagtcggtgc

SEQ ID NO: 4382 - RNA, 125 nt, synthetic construct
  source 1..125: mol_type = other RNA
gtcaccaggaacatgtacctggtttaagagctagaaatagcaagtttaaataaggctagtccgttatcagcgtgattcccccaggtgtacatgttcctgcaagaaacgcggcaccgagtcggtgc

SEQ ID NO: 4383 - RNA, 127 nt, synthetic construct
  source 1..127: mol_type = other RNA
gtcaccaggaacatgtacctggtttaagagctagaaatagcaagtttaaataaggctagtccgttatcagcgtgattcccccaggtgtacatgttcctgtgctctaaacgcggcaccgagtcggtgc

SEQ ID NO: 4384 - RNA, 129 nt, synthetic construct
  source 1..129: mol_type = other RNA
gtcaccaggaacatgtacctggtttaagagctagaaatagcaagtttaaataaggctagtccgttatcagcgtgattcccccaggtgtacatgttcctgcttcttcgaaacgcggcaccgagtcggtgc

SEQ ID NO: 4385 - RNA, 115 nt, synthetic construct
  source 1..115: mol_type = other RNA
gtcaccaggaacatgtacctggtttaagagctagaaatagcaagtttaaataaggctagtccgttatcagcgtgattcccccaggtgtacatgaaacgcggcaccgagtcggtgc

SEQ ID NO: 4386 - RNA, 117 nt, synthetic construct
  source 1..117: mol_type = other RNA
gtcaccaggaacatgtacctggtttaagagctagaaatagcaagtttaaataaggctagtccgttatcagcgtgattcccccaggtgtacatgataaacgcggcaccgagtcggtgc

SEQ ID NO: 4387 - RNA, 119 nt, synthetic construct
  source 1..119: mol_type = other RNA
gtcaccaggaacatgtacctggtttaagagctagaaatagcaagtttaaataaggctagtccgttatcagcgtgattcccccaggtgtacatgaataaaacgcggcaccgagtcggtgc

SEQ ID NO: 4388 - RNA, 121 nt, synthetic construct
  source 1..121: mol_type = other RNA
gtcaccaggaacatgtacctggtttaagagctagaaatagcaagtttaaataaggctagtccgttatcagcgtgattcccccaggtgtacatgactactaaacgcggcaccgagtcggtgc

SEQ ID NO: 4389 - RNA, 123 nt, synthetic construct
  source 1..123: mol_type = other RNA
gtcaccaggaacatgtacctggtttaagagctagaaatagcaagtttaaataaggctagtccgttatcagcgtgattcccccaggtgtacatgactaaaacaaacgcggcaccgagtcggtgc

SEQ ID NO: 4390 - RNA, 119 nt, synthetic construct
  source 1..119: mol_type = other RNA
ggcccagactgagcacgtgagtttaagagctagaaatagcaagtttaaataaggctagtccgttatcagcgtgattcctctggcatcacgtgctcagaaacgcggcaccgagtcggtgc

SEQ ID NO: 4391 - RNA, 121 nt, synthetic construct
  source 1..121: mol_type = other RNA
ggcccagactgagcacgtgagtttaagagctagaaatagcaagtttaaataaggctagtccgttatcagcgtgattcctctggcatcacgtgctcagagaaacgcggcaccgagtcggtgc

SEQ ID NO: 4392 - RNA, 123 nt, synthetic construct
  source 1..123: mol_type = other RNA
ggcccagactgagcacgtgagtttaagagctagaaatagcaagtttaaataaggctagtccgttatcagcgtgattcctctggcatcacgtgctcagaaagaaacgcggcaccgagtcggtgc

SEQ ID NO: 4393 - RNA, 125 nt, synthetic construct
  source 1..125: mol_type = other RNA
ggcccagactgagcacgtgagtttaagagctagaaatagcaagtttaaataaggctagtccgttatcagcgtgattcctctggcatcacgtgctcagattccaaaacgcggcaccgagtcggtgc

SEQ ID NO: 4394 - RNA, 127 nt, synthetic construct
  source 1..127: mol_type = other RNA
ggcccagactgagcacgtgagtttaagagctagaaatagcaagtttaaataaggctagtccgttatcagcgtgattcctctggcatcacgtgctcaggcacaaagaaacgcggcaccgagtcggtgc

SEQ ID NO: 4395 - RNA, 124 nt, synthetic construct
  source 1..124: mol_type = other RNA
ggcccagactgagcacgtgagtttaagagctagaaatagcaagtttaaataaggctagtccgttatcagcgtgattcctctgccatcaaagcgtgctcagtcaaacgcggcaccgagtcggtgc

SEQ ID NO: 4396 - RNA, 126 nt, synthetic construct
  source 1..126: mol_type = other RNA
ggcccagactgagcacgtgagtttaagagctagaaatagcaagtttaaataaggctagtccgttatcagcgtgattcctctgccatcaaagcgtgctcagtccaaaacgcggcaccgagtcggtgc

SEQ ID NO: 4397 - RNA, 128 nt, synthetic construct
  source 1..128: mol_type = other RNA
ggcccagactgagcacgtgagtttaagagctagaaatagcaagtttaaataaggctagtccgttatcagcgtgattcctctgccatcaaagcgtgctcagtccacaaaacgcggcaccgagtcggtgc

SEQ ID NO: 4398 - RNA, 130 nt, synthetic construct
  source 1..130: mol_type = other RNA
ggcccagactgagcacgtgagtttaagagctagaaatagcaagtttaaataaggctagtccgttatcagcgtgattcctctgccatcaaagcgtgctcagtcccattcaaacgcggcaccgagtcggtgc

SEQ ID NO: 4399 - RNA, 132 nt, synthetic construct
  source 1..132: mol_type = other RNA
ggcccagactgagcacgtgagtttaagagctagaaatagcaagtttaaataaggctagtccgttatcagcgtgattcctctgccatcaaagcgtgctcagtccaactgataaacgcggcaccgagtcggtgc

SEQ ID NO: 4400 - RNA, 123 nt, synthetic construct
  source 1..123: mol_type = other RNA
gagtccgagcagaagaagaagtttaagagctagaaatagcaagtttaaataaggctagtccgttatcagcgtgagatgggagcccttgttcttctgctcggaaacgcggcaccgagtcggtgc

SEQ ID NO: 4401 - RNA, 125 nt, synthetic construct
  source 1..125: mol_type = other RNA
gagtccgagcagaagaagaagtttaagagctagaaatagcaagtttaaataaggctagtccgttatcagcgtgagatgggagcccttgttcttctgctcggtgaaacgcggcaccgagtcggtgc

SEQ ID NO: 4402 - RNA, 127 nt, synthetic construct
  source 1..127: mol_type = other RNA
gagtccgagcagaagaagaagtttaagagctagaaatagcaagtttaaataaggctagtccgttatcagcgtgagatgggagcccttgttcttctgctcgggttgaaacgcggcaccgagtcggtgc

SEQ ID NO: 4403 - RNA, 129 nt, synthetic construct
  source 1..129: mol_type = other RNA
gagtccgagcagaagaagaagtttaagagctagaaatagcaagtttaaataaggctagtccgttatcagcgtgagatgggagcccttgttcttctgctcggtgaaaaaaacgcggcaccgagtcggtgc

SEQ ID NO: 4404 - RNA, 131 nt, synthetic construct
  source 1..131: mol_type = other RNA
gagtccgagcagaagaagaagtttaagagctagaaatagcaagtttaaataaggctagtccgttatcagcgtgagatgggagcccttgttcttctgctcggtaaacagtaaacgcggcaccgagtcggtgc

SEQ ID NO: 4405 - RNA, 119 nt, synthetic construct
  source 1..119: mol_type = other RNA
gagtccgagcagaagaagaagtttaagagctagaaatagcaagtttaaataaggctagtccgttatcagcgtgagagcccttcgcattcttctgctcaaacgcggcaccgagtcggtgc

SEQ ID NO: 4406 - RNA, 121 nt, synthetic construct
  source 1..121: mol_type = other RNA
gagtccgagcagaagaagaagtttaagagctagaaatagcaagtttaaataaggctagtccgttatcagcgtgagagcccttcgcattcttctgctcccaaacgcggcaccgagtcggtgc

SEQ ID NO: 4407 - RNA, 123 nt, synthetic construct
  source 1..123: mol_type = other RNA
gagtccgagcagaagaagaagtttaagagctagaaatagcaagtttaaataaggctagtccgttatcagcgtgagagcccttcgcattcttctgctcccccaaacgcggcaccgagtcggtgc

SEQ ID NO: 4408 - RNA, 125 nt, synthetic construct
  source 1..125: mol_type = other RNA
gagtccgagcagaagaagaagtttaagagctagaaatagcaagtttaaataaggctagtccgttatcagcgtgagagcccttcgcattcttctgctcctaaagaaacgcggcaccgagtcggtgc

SEQ ID NO: 4409 - RNA, 127 nt, synthetic construct
  source 1..127: mol_type = other RNA
gagtccgagcagaagaagaagtttaagagctagaaatagcaagtttaaataaggctagtccgttatcagcgtgagagcccttcgcattcttctgctccagtccccaaacgcggcaccgagtcggtgc

SEQ ID NO: 4410 - RNA, 117 nt, synthetic construct
  source 1..117: mol_type = other RNA
ggaatcccttctgcagcaccgtttaagagctagaaatagcaagtttaaataaggctagtccgttatcagcgtgaaagcgatccagctgcagaaggaaacgcggcaccgagtcggtgc

SEQ ID NO: 4411 - RNA, 119 nt, synthetic construct
  source 1..119: mol_type = other RNA
ggaatcccttctgcagcaccgtttaagagctagaaatagcaagtttaaataaggctagtccgttatcagcgtgaaagcgatccagctgcagaaggctaaacgcggcaccgagtcggtgc

SEQ ID NO: 4412 - RNA, 121 nt, synthetic construct
  source 1..121: mol_type = other RNA
ggaatcccttctgcagcaccgtttaagagctagaaatagcaagtttaaataaggctagtccgttatcagcgtgaaagcgatccagctgcagaaggctaaaaacgcggcaccgagtcggtgc

SEQ ID NO: 4413 - RNA, 123 nt, synthetic construct
  source 1..123: mol_type = other RNA
ggaatcccttctgcagcaccgtttaagagctagaaatagcaagtttaaataaggctagtccgttatcagcgtgaaagcgatccagctgcagaaggccctacaaacgcggcaccgagtcggtgc

SEQ ID NO: 4414 - RNA, 125 nt, synthetic construct
  source 1..125: mol_type = other RNA
ggaatcccttctgcagcaccgtttaagagctagaaatagcaagtttaaataaggctagtccgttatcagcgtgaaagcgatccagctgcagaaggctaatagtaaacgcggcaccgagtcggtgc

SEQ ID NO: 4415 - RNA, 117 nt, synthetic construct
  source 1..117: mol_type = other RNA
ggaatcccttctgcagcaccgtttaagagctagaaatagcaagtttaaataaggctagtccgttatcagcgtgaaagcgatcaaggtgctgcagaaaacgcggcaccgagtcggtgc

SEQ ID NO: 4416 - RNA, 119 nt, synthetic construct
  source 1..119: mol_type = other RNA
ggaatcccttctgcagcaccgtttaagagctagaaatagcaagtttaaataaggctagtccgttatcagcgtgaaagcgatcaaggtgctgcagacaaaacgcggcaccgagtcggtgc

SEQ ID NO: 4417 - RNA, 121 nt, synthetic construct
  source 1..121: mol_type = other RNA
ggaatcccttctgcagcaccgtttaagagctagaaatagcaagtttaaataaggctagtccgttatcagcgtgaaagcgatcaaggtgctgcagacatcaaacgcggcaccgagtcggtgc

SEQ ID NO: 4418 - RNA, 123 nt, synthetic construct
  source 1..123: mol_type = other RNA
ggaatcccttctgcagcaccgtttaagagctagaaatagcaagtttaaataaggctagtccgttatcagcgtgaaagcgatcaaggtgctgcagacctgtcaaacgcggcaccgagtcggtgc

SEQ ID NO: 4419 - RNA, 125 nt, synthetic construct
  source 1..125: mol_type = other RNA
ggaatcccttctgcagcaccgtttaagagctagaaatagcaagtttaaataaggctagtccgttatcagcgtgaaagcgatcaaggtgctgcagacagacttcaaacgcggcaccgagtcggtgc

SEQ ID NO: 4420 - RNA, 131 nt, synthetic construct
  source 1..131: mol_type = other RNA
ggctcagccaggtagtactggtttaagagctagaaatagcaagtttaaataaggctagtccgttatcagcgtgaacgcagccccttcgagtacccacagtactacctggaaacgcggcaccgagtcggtgc

SEQ ID NO: 4421 - RNA, 133 nt, synthetic construct
  source 1..133: mol_type = other RNA
ggctcagccaggtagtactggtttaagagctagaaatagcaagtttaaataaggctagtccgttatcagcgtgaacgcagccccttcgagtacccacagtactacctggacaaacgcggcaccgagtcggtgc

SEQ ID NO: 4422 - RNA, 135 nt, synthetic construct
  source 1..135: mol_type = other RNA
ggctcagccaggtagtactggtttaagagctagaaatagcaagtttaaataaggctagtccgttatcagcgtgaacgcagccccttcgagtacccacagtactacctggaaaaaaacgcggcaccgagtcggtgc

SEQ ID NO: 4423 - RNA, 137 nt, synthetic construct
  source 1..137: mol_type = other RNA
ggctcagccaggtagtactggtttaagagctagaaatagcaagtttaaataaggctagtccgttatcagcgtgaacgcagccccttcgagtacccacagtactacctgggaccaaaaacgcggcaccgagtcggtgc

SEQ ID NO: 4424 - RNA, 139 nt, synthetic construct
  source 1..139: mol_type = other RNA
ggctcagccaggtagtactggtttaagagctagaaatagcaagtttaaataaggctagtccgttatcagcgtgaacgcagccccttcgagtacccacagtactacctggataatatgaaacgcggcaccgagtcggtgc

SEQ ID NO: 4425 - RNA, 129 nt, synthetic construct
  source 1..129: mol_type = other RNA
gagtactgtgggtactcgaaggtttaagagctagaaatagcaagtttaaataaggctagtccgttatcagcgtgagtgtggtacgcagccccttcgagtacccacagaaacgcggcaccgagtcggtgc

SEQ ID NO: 4426 - RNA, 131 nt, synthetic construct
  source 1..131: mol_type = other RNA
gagtactgtgggtactcgaaggtttaagagctagaaatagcaagtttaaataaggctagtccgttatcagcgtgagtgtggtacgcagccccttcgagtacccacagagaaacgcggcaccgagtcggtgc

SEQ ID NO: 4427 - RNA, 133 nt, synthetic construct
  source 1..133: mol_type = other RNA
gagtactgtgggtactcgaaggtttaagagctagaaatagcaagtttaaataaggctagtccgttatcagcgtgagtgtggtacgcagccccttcgagtacccacagccgaaaacgcggcaccgagtcggtgc

SEQ ID NO: 4428 - RNA, 135 nt, synthetic construct
  source 1..135: mol_type = other RNA
gagtactgtgggtactcgaaggtttaagagctagaaatagcaagtttaaataaggctagtccgttatcagcgtgagtgtggtacgcagccccttcgagtacccacagatcataaaacgcggcaccgagtcggtgc

SEQ ID NO: 4429 - RNA, 137 nt, synthetic construct
  source 1..137: mol_type = other RNA
gagtactgtgggtactcgaaggtttaagagctagaaatagcaagtttaaataaggctagtccgttatcagcgtgagtgtggtacgcagccccttcgagtacccacagatagcccaaaacgcggcaccgagtcggtgc

SEQ ID NO: 4430 - RNA, 129 nt, synthetic construct
  source 1..129: mol_type = other RNA
gcagctctggatcctggtatgtttaagagctagaaatagcaagtttaaataaggctagtccgttatcagcgtgaagaaaccaaatacagctcccaataccaggatccaaacgcggcaccgagtcggtgc

SEQ ID NO: 4431 - RNA, 131 nt, synthetic construct
  source 1..131: mol_type = other RNA
gcagctctggatcctggtatgtttaagagctagaaatagcaagtttaaataaggctagtccgttatcagcgtgaagaaaccaaatacagctcccaataccaggatccccaaacgcggcaccgagtcggtgc

SEQ ID NO: 4432 - RNA, 133 nt, synthetic construct
  source 1..133: mol_type = other RNA
gcagctctggatcctggtatgtttaagagctagaaatagcaagtttaaataaggctagtccgttatcagcgtgaagaaaccaaatacagctcccaataccaggatcccacaaaacgcggcaccgagtcggtgc

SEQ ID NO: 4433 - RNA, 135 nt, synthetic construct
  source 1..135: mol_type = other RNA
gcagctctggatcctggtatgtttaagagctagaaatagcaagtttaaataaggctagtccgttatcagcgtgaagaaaccaaatacagctcccaataccaggatccctatataaacgcggcaccgagtcggtgc

SEQ ID NO: 4434 - RNA, 137 nt, synthetic construct
  source 1..137: mol_type = other RNA
gcagctctggatcctggtatgtttaagagctagaaatagcaagtttaaataaggctagtccgttatcagcgtgaagaaaccaaatacagctcccaataccaggatcccccgatcaaaacgcggcaccgagtcggtgc

SEQ ID NO: 4435 - RNA, 129 nt, synthetic construct
  source 1..129: mol_type = other RNA
gcagctctggatcctggtatgtttaagagctagaaatagcaagtttaaataaggctagtccgttatcagcgtgagaaaccaaatacagctcccaataccaggatccaaaacgcggcaccgagtcggtgc

SEQ ID NO: 4436 - RNA, 131 nt, synthetic construct
  source 1..131: mol_type = other RNA
gcagctctggatcctggtatgtttaagagctagaaatagcaagtttaaataaggctagtccgttatcagcgtgagaaaccaaatacagctcccaataccaggatccaccaaacgcggcaccgagtcggtgc

SEQ ID NO: 4437 - RNA, 133 nt, synthetic construct
  source 1..133: mol_type = other RNA
gcagctctggatcctggtatgtttaagagctagaaatagcaagtttaaataaggctagtccgttatcagcgtgagaaaccaaatacagctcccaataccaggatccaccacaaacgcggcaccgagtcggtgc

SEQ ID NO: 4438 - RNA, 135 nt, synthetic construct
  source 1..135: mol_type = other RNA
gcagctctggatcctggtatgtttaagagctagaaatagcaagtttaaataaggctagtccgttatcagcgtgagaaaccaaatacagctcccaataccaggatccactttcaaaacgcggcaccgagtcggtgc

SEQ ID NO: 4439 - RNA, 137 nt, synthetic construct
  source 1..137: mol_type = other RNA
gcagctctggatcctggtatgtttaagagctagaaatagcaagtttaaataaggctagtccgttatcagcgtgagaaaccaaatacagctcccaataccaggatccacttcgttaaaacgcggcaccgagtcggtgc

SEQ ID NO: 4440 - protein, 2117 aa, synthetic construct
MKRTADGSEFESPKKKRKVDKKYSIGLDIGTNSVGWAVITDEYKVPSKKFKVLGNTDRHSIKKNLIGALLFDSGETAEATRLKRTARRRYTRRKNRICYLQEIFSNEMAKVDDSFFHRLEESFLVEEDKKHERHPIFGNIVDEVAYHEKYPTIYHLRKKLVDSTDKADLRLIYLALAHMIKFRGHFLIEGDLNPDNSDVDKLFIQLVQTYNQLFEENPINASGVDAKAILSARLSKSRRLENLIAQLPGEKKNGLFGNLIALSLGLTPNFKSNFDLAEDAKLQLSKDTYDDDLDNLLAQIGDQYADLFLAAKNLSDAILLSDILRVNTEITKAPLSASMIKRYDEHHQDLTLLKALVRQQLPEKYKEIFFDQSKNGYAGYIDGGASQEEFYKFIKPILEKMDGTEELLVKLNREDLLRKQRTFDNGSIPHQIHLGELHAILRRQEDFYPFLKDNREKIEKILTFRIPYYVGPLARGNSRFAWMTRKSEETITPWNFEEVVDKGASAQSFIERMTNFDKNLPNEKVLPKHSLLYEYFTVYNELTKVKYVTEGMRKPAFLSGEQKKAIVDLLFKTNRKVTVKQLKEDYFKKIECFDSVEISGVEDRFNASLGTYHDLLKIIKDKDFLDNEENEDILEDIVLTLTLFEDREMIEERLKTYAHLFDDKVMKQLKRRRYTGWGRLSRKLINGIRDKQSGKTILDFLKSDGFANRNFMQLIHDDSLTFKEDIQKAQVSGQGDSLHEHIANLAGSPAIKKGILQTVKVVDELVKVMGRHKPENIVIEMARENQTTQKGQKNSRERMKRIEEGIKELGSQILKEHPVENTQLQNEKLYLYYLQNGRDMYVDQELDINRLSDYDVDAIVPQSFLKDDSIDNKVLTRSDKNRGKSDNVPSEEVVKKMKNYWRQLLNAKLITQRKFDNLTKAERGGLSELDKAGFIKRQLVETRQITKHVAQILDSRMNTKYDENDKLIREVKVITLKSKLVSDFRKDFQFYKVREINNYHHAHDAYLNAVVGTALIKKYPKLESEFVYGDYKVYDVRKMIAKSEQEIGKATAKYFFYSNIMNFFKTEITLANGEIRKRPLIETNGETGEIVWDKGRDFATVRKVLSMPQVNIVKKTEVQTGGFSKESILPKRNSDKLIARKKDWDPKKYGGFDSPTVAYSVLVVAKVEKGKSKKLKSVKELLGITIMERSSFEKNPIDFLEAKGYKEVKKDLIIKLPKYSLFELENGRKRMLASAGELQKGNELALPSKYVNFLYLASHYEKLKGSPEDNEQKQLFVEQHKHYLDEIIEQISEFSKRVILADANLDKVLSAYNKHRDKPIREQAENIIHLFTLTNLGAPAAFKYFDTTIDRKRYTSTKEVLDATLIHQSITGLYETRIDLSQLGGDSGGSSGGSSGSETPGTSESATPESSGGSSGGSSTLNIEDEYRLHETSKEPDVSLGSTWLSDFPQAWAETGGMGLAVRQAPLIIPLKATSTPVSIKQYPMSQEARLGIKPHIQRLLDQGILVPCQSPWNTPLLPVKKPGTNDYRPVQDLREVNKRVEDIHPTVPNPYNLLSGLPPSHQWYTVLDLKDAFFCLRLHPTSQPLFAFEWRDPEMGISGQLTWTRLPQGFKNSPTLFNEALHRDLADFRIQHPDLILLQYVDDLLLAATSELDCQQGTRALLQTLGNLGYRASAKKAQICQKQVKYLGYLLKEGQRWLTEARKETVMGQPTPKTPRQLREFLGKAGFCRLFIPGFAEMAAPLYPLTKPGTLFNWGPDQQKAYQEIKQALLTAPALGLPDLTKPFELFVDEKQGYAKGVLTQKLGPWRRPVAYLSKKLDPVAAGWPPCLRMVAAIAVLTKDAGKLTMGQPLVILAPHAVEALVKQPPDRWLSNARMTHYQALLLDTDRVQFGPVVALNPATLLPLPEEGLQHNCLDILAEAHGTRPDLTDQPLPDADHTWYTDGSSLLQEGQRKAGAAVTTETEVIWAKALPAGTSAQRAELIALTQALKMAEGKKLNVYTDSRYAFATAHIHGEIYRRRGWLTSEGKEIKNKDEILALLKALFLPKRLSIIHCPGHQKGHSAEARGNRMADQAARKAAITETPDTSTLLIENSSPSGGSKRTADGSEFEPKKKRKV

SEQ ID NO: 4441 - protein, 19 aa, synthetic construct
MKRTADGSEFESPKKKRKV

SEQ ID NO: 4442 - protein, 1367 aa, synthetic construct
DKKYSIGLDIGTNSVGWAVITDEYKVPSKKFKVLGNTDRHSIKKNLIGALLFDSGETAEATRLKRTARRRYTRRKNRICYLQEIFSNEMAKVDDSFFHRLEESFLVEEDKKHERHPIFGNIVDEVAYHEKYPTIYHLRKKLVDSTDKADLRLIYLALAHMIKFRGHFLIEGDLNPDNSDVDKLFIQLVQTYNQLFEENPINASGVDAKAILSARLSKSRRLENLIAQLPGEKKNGLFGNLIALSLGLTPNFKSNFDLAEDAKLQLSKDTYDDDLDNLLAQIGDQYADLFLAAKNLSDAILLSDILRVNTEITKAPLSASMIKRYDEHHQDLTLLKALVRQQLPEKYKEIFFDQSKNGYAGYIDGGASQEEFYKFIKPILEKMDGTEELLVKLNREDLLRKQRTFDNGSIPHQIHLGELHAILRRQEDFYPFLKDNREKIEKILTFRIPYYVGPLARGNSRFAWMTRKSEETITPWNFEEVVDKGASAQSFIERMTNFDKNLPNEKVLPKHSLLYEYFTVYNELTKVKYVTEGMRKPAFLSGEQKKAIVDLLFKTNRKVTVKQLKEDYFKKIECFDSVEISGVEDRFNASLGTYHDLLKIIKDKDFLDNEENEDILEDIVLTLTLFEDREMIEERLKTYAHLFDDKVMKQLKRRRYTGWGRLSRKLINGIRDKQSGKTILDFLKSDGFANRNFMQLIHDDSLTFKEDIQKAQVSGQGDSLHEHIANLAGSPAIKKGILQTVKVVDELVKVMGRHKPENIVIEMARENQTTQKGQKNSRERMKRIEEGIKELGSQILKEHPVENTQLQNEKLYLYYLQNGRDMYVDQELDINRLSDYDVDAIVPQSFLKDDSIDNKVLTRSDKNRGKSDNVPSEEVVKKMKNYWRQLLNAKLITQRKFDNLTKAERGGLSELDKAGFIKRQLVETRQITKHVAQILDSRMNTKYDENDKLIREVKVITLKSKLVSDFRKDFQFYKVREINNYHHAHDAYLNAVVGTALIKKYPKLESEFVYGDYKVYDVRKMIAKSEQEIGKATAKYFFYSNIMNFFKTEITLANGEIRKRPLIETNGETGEIVWDKGRDFATVRKVLSMPQVNIVKKTEVQTGGFSKESILPKRNSDKLIARKKDWDPKKYGGFDSPTVAYSVLVVAKVEKGKSKKLKSVKELLGITIMERSSFEKNPIDFLEAKGYKEVKKDLIIKLPKYSLFELENGRKRMLASAGELQKGNELALPSKYVNFLYLASHYEKLKGSPEDNEQKQLFVEQHKHYLDEIIEQISEFSKRVILADANLDKVLSAYNKHRDKPIREQAENIIHLFTLTNLGAPAAFKYFDTTIDRKRYTSTKEVLDATLIHQSITGLYETRIDLSQLGGD

SEQ ID NO: 4443 - protein, 33 aa, synthetic construct
SGGSSGGSSGSETPGTSESATPESSGGSSGGSS

SEQ ID NO: 4444 - protein, 677 aa, synthetic construct
TLNIEDEYRLHETSKEPDVSLGSTWLSDFPQAWAETGGMGLAVRQAPLIIPLKATSTPVSIKQYPMSQEARLGIKPHIQRLLDQGILVPCQSPWNTPLLPVKKPGTNDYRPVQDLREVNKRVEDIHPTVPNPYNLLSGLPPSHQWYTVLDLKDAFFCLRLHPTSQPLFAFEWRDPEMGISGQLTWTRLPQGFKNSPTLFNEALHRDLADFRIQHPDLILLQYVDDLLLAATSELDCQQGTRALLQTLGNLGYRASAKKAQICQKQVKYLGYLLKEGQRWLTEARKETVMGQPTPKTPRQLREFLGKAGFCRLFIPGFAEMAAPLYPLTKPGTLFNWGPDQQKAYQEIKQALLTAPALGLPDLTKPFELFVDEKQGYAKGVLTQKLGPWRRPVAYLSKKLDPVAAGWPPCLRMVAAIAVLTKDAGKLTMGQPLVILAPHAVEALVKQPPDRWLSNARMTHYQALLLDTDRVQFGPVVALNPATLLPLPEEGLQHNCLDILAEAHGTRPDLTDQPLPDADHTWYTDGSSLLQEGQRKAGAAVTTETEVIWAKALPAGTSAQRAELIALTQALKMAEGKKLNVYTDSRYAFATAHIHGEIYRRRGWLTSEGKEIKNKDEILALLKALFLPKRLSIIHCPGHQKGHSAEARGNRMADQAARKAAITETPDTSTLLIENSSP

SEQ ID NO: 4445 - protein, 21 aa, synthetic construct
SGGSKRTADGSEFEPKKKRKV

SEQ ID NO: 4446 - DNA, 33 bp, synthetic construct
  source 1..33: mol_type = other DNA
gccaacatgaggatcacccatgtctgcagggcc

SEQ ID NO: 4447 - protein, 131 aa, synthetic construct
GSASNFTQFVLVDNGGTGDVTVAPSNFANGVAEWISSNSRSQAYKVTCSVRQSSAQNRKYTIKVEVPKVATQTVGGEELPVAGWRSYLNMELTIPIFATNSDCELIVKAMQGLLKDGNPIPSAIAANSGIY

SEQ ID NO: 4448 - protein, 677 aa, Moloney murine leukemia virus
TLNIEDEYRLHETSKEPDVSLGSTWLSDFPQAWAETGGMGLAVRQAPLIIPLKATSTPVSIKQYPMSQEARLGIKPHIQRLLDQGILVPCQSPWNTPLLPVKKPGTNDYRPVQDLREVNKRVEDIHPTVPNPYNLLSGLPPSHQWYTVLDLKDAFFCLRLHPTSQPLFAFEWRDPEMGISGQLTWTRLPQGFKNSPTLFDEALHRDLADFRIQHPDLILLQYVDDLLLAATSELDCQQGTRALLQTLGNLGYRASAKKAQICQKQVKYLGYLLKEGQRWLTEARKETVMGQPTPKTPRQLREFLGTAGFCRLWIPGFAEMAAPLYPLTKTGTLFNWGPDQQKAYQEIKQALLTAPALGLPDLTKPFELFVDEKQGYAKGVLTQKLGPWRRPVAYLSKKLDPVAAGWPPCLRMVAAIAVLTKDAGKLTMGQPLVILAPHAVEALVKQPPDRWLSNARMTHYQALLLDTDRVQFGPVVALNPATLLPLPEEGLQHNCLDILAEAHGTRPDLTDQPLPDADHTWYTDGSSLLQEGQRKAGAAVTTETEVIWAKALPAGTSAQRAELIALTQALKMAEGKKLNVYTDSRYAFATAHIHGEIYRRRGLLTSEGKEIKNKDEILALLKALFLPKRLSIIHCPGHQKGHSAEARGNRMADQAARKAAITETPDTSTLLIENSSP

SEQ ID NO: 4449 - protein, 1368 aa, Streptococcus pyogenes [sequence omitted]

SEQ ID NO: 4450 - protein, 1052 aa, Staphylococcus lugdunensis
MKRNYILGLDIGITSVGYGIIDYETRDVIDAGVRLFKEANVENNEGRRSKRGARRLKRRRRHRIQRVKKLLFDYNLLTDHSELSGINPYEARVKGLSQKLSEEEFSAALLHLAKRRGVHNVNEVEEDTGNELSTKEQISRNSKALEEKYVAELQLERLKKDGEVRGSINRFKTSDYVKEAKQLLKVQKAYHQLDQSFIDTYIDLLETRRTYYEGPGEGSPFGWKDIKEWYEMLMGHCTYFPEELRSVKYAYNADLYNALNDLNNLVITRDENEKLEYYEKFQIIENVFKQKKKPTLKQIAKEILVNEEDIKGYRVTSTGKPEFTNLKVYHDIKDITARKEIIENAELLDQIAKILTIYQSSEDIQEELTNLNSELTQEEIEQISNLKGYTGTHNLSLKAINLILDELWHTNDNQIAIFNRLKLVPKKVDLSQQKEIPTTLVDDFILSPVVKRSFIQSIKVINAIIKKYGLPNDIIIELAREKNSKDAQKMINEMQKRNRQTNERIEEIIRTTGKENAKYLIEKIKLHDMQEGKCLYSLEAIPLEDLLNNPFNYEVDHIIPRSVSFDNSFNNKVLVKQEEASKKGNRTPFQYLSSSDSKISYETFKKHILNLAKGKGRISKTKKEYLLEERDINRFSVQKDFINRNLVDTRYATRGLMNLLRSYFRVNNLDVKVKSINGGFTSFLRRKWKFKKERNKGYKHHAEDALIIANADFIFKEWKKLDKAKKVMENQMFEEKQAESMPEIETEQEYKEIFITPHQIKHIKDFKDYKYSHRVDKKPNRELINDTLYSTRKDDKGNTLIVNNLNGLYDKDNDKLKKLINKSPEKLLMYHHDPQTYQKLKLIMEQYGDEKNPLYKYYEETGNYLTKYSKKDNGPVIKKIKYYGNKLNAHLDITDDYPNSRNKVVKLSLKPYRFDVYLDNGVYKFVTVKNLDVIKKENYYEVNSKCYEEAKKLKKISNQAEFIASFYNNDLIKINGELYRVIGVNNDLLNRIEVNMIDITYREYLENMNDKRPPRIIKTIASKTQSIKKYSTDILGNLYEVKSKKHPQIIKK

SEQ ID NO: 4451 - protein, 16 aa, Xenopus sp.
  VARIANT 3..12: note = Any amino acid
KRXXXXXXXXXXKKKL

SEQ ID NO: 4452 - RNA, 78 nt, synthetic construct
  source 1..78: mol_type = other RNA
gtttaagagcggggaaatccgcaagtttaaataaggctagtccgttatcagcgtgaaaacgcggcaccgagtcggtgc

SEQ ID NO: 4453 - RNA, 37 nt, synthetic construct
  source 1..37: mol_type = other RNA
cgcggttctatctagttacgcgttaaaccaactagaa

SEQ ID NO: 4454 - RNA, 21 nt, synthetic construct
  source 1..21: mol_type = other RNA
gtttggtgactgccacgccca

SEQ ID NO: 4455 - RNA, 21 nt, synthetic construct
  source 1..21: mol_type = other RNA
gttgccaagtgttccagccac

SEQ ID NO: 4456 - RNA, 21 nt, synthetic construct
  source 1..21: mol_type = other RNA
gtcaccaggaacatgtacctg

SEQ ID NO: 4457 - RNA, 20 nt, synthetic construct
  source 1..20: mol_type = other RNA
ggcccagactgagcacgtga

SEQ ID NO: 4458 - RNA, 20 nt, synthetic construct
  source 1..20: mol_type = other RNA
gagtccgagcagaagaagaa

SEQ ID NO: 4459 - RNA, 20 nt, synthetic construct
  source 1..20: mol_type = other RNA
ggaatcccttctgcagcacc

SEQ ID NO: 4460 - RNA, 20 nt, synthetic construct
  source 1..20: mol_type = other RNA
ggctcagccaggtagtactg

SEQ ID NO: 4461 - RNA, 21 nt, synthetic construct
  source 1..21: mol_type = other RNA
gagtactgtgggtactcgaag

SEQ ID NO: 4462 - RNA, 20 nt, synthetic construct
  source 1..20: mol_type = other RNA
gcagctctggatcctggtat

SEQ ID NO: 4463 - RNA, 19 nt, synthetic construct
  source 1..19: mol_type = other RNA
aacaccccttgggcgtggc

SEQ ID NO: 4464 - RNA, 25 nt, synthetic construct
  source 1..25: mol_type = other RNA
aacaccccttgggcgtggcagtcac

SEQ ID NO: 4465 - RNA, 27 nt, synthetic construct
  source 1..27: mol_type = other RNA
ttgccctgggccggtggctggaacact

SEQ ID NO: 4466 - RNA, 26 nt, synthetic construct
  source 1..26: mol_type = other RNA
gccctgggccggtggctggaacactt

SEQ ID NO: 4467 - RNA, 24 nt, synthetic construct
  source 1..24: mol_type = other RNA
ttcccccaggtgtacatgttcctg

SEQ ID NO: 4468 - RNA, 18 nt, synthetic construct
  source 1..18: mol_type = other RNA
ttcccccaggtgtacatg

SEQ ID NO: 4469 - RNA, 23 nt, synthetic construct
  source 1..23: mol_type = other RNA
ttcctctggcatcacgtgctcag

SEQ ID NO: 4470 - RNA, 28 nt, synthetic construct
  source 1..28: mol_type = other RNA
ttcctctgccatcaaagcgtgctcagtc

SEQ ID NO: 4471 - RNA, 27 nt, synthetic construct
  source 1..27: mol_type = other RNA
gatgggagcccttgttcttctgctcgg

SEQ ID NO: 4472 - RNA, 23 nt, synthetic construct
  source 1..23: mol_type = other RNA
gagcccttcgcattcttctgctc

SEQ ID NO: 4473 - RNA, 21 nt, synthetic construct
  source 1..21: mol_type = other RNA
aagcgatccagctgcagaagg

SEQ ID NO: 4474 - RNA, 21 nt, synthetic construct
  source 1..21: mol_type = other RNA
aagcgatcaaggtgctgcaga

SEQ ID NO: 4475 - RNA, 35 nt, synthetic construct
  source 1..35: mol_type = other RNA
acgcagccccttcgagtacccacagtactacctgg

SEQ ID NO: 4476 - RNA, 32 nt, synthetic construct
  source 1..32: mol_type = other RNA
gtgtggtacgcagccccttcgagtacccacag

SEQ ID NO: 4477 - RNA, 33 nt, synthetic construct
  source 1..33: mol_type = other RNA
agaaaccaaatacagctcccaataccaggatcc

SEQ ID NO: 4478 - RNA, 33 nt, synthetic construct
  source 1..33: mol_type = other RNA
gaaaccaaatacagctcccaataccaggatcca

SEQ ID NO: 4479 - RNA, 116 nt, synthetic construct
  source 1..116: mol_type = other RNA
gtttggtgactgccacgcccagttttagagctagaaatagcaagttaaaataaggctagtccgttatcaacttgaaaaagtggcaccgagtcggtgcaacaccccttgggcgtggc

SEQ ID NO: 4480 - RNA, 124 nt, synthetic construct
  source 1..124: mol_type = other RNA
gtttggtgactgccacgcccagttttagagctagaaatagcaagttaaaataaggctagtccgttatcaacttgaaaaagtggcaccgagtcggtgcaacaccccttgggcgtggcttagtgtt

SEQ ID NO: 4481 - RNA, 126 nt, synthetic construct
  source 1..126: mol_type = other RNA
gtttggtgactgccacgcccagttttagagctagaaatagcaagttaaaataaggctagtccgttatcaacttgaaaaagtggcaccgagtcggtgcaacaccccttgggcgtggctaaatgtgtt

SEQ ID NO: 4482 - RNA, 125 nt, synthetic construct
  source 1..125: mol_type = other RNA
gtttggtgactgccacgcccagttttagagctagaaatagcaagttaaaataaggctagtccgttatcaacttgaaaaagtggcaccgagtcggtgcaacaccccttgggcgtggcgacctgtgt

SEQ ID NO: 4483 - RNA, 124 nt, synthetic construct
  source 1..124: mol_type = other RNA
gtttggtgactgccacgcccagttttagagctagaaatagcaagttaaaataaggctagtccgttatcaacttgaaaaagtggcaccgagtcggtgcaacaccccttgggcgtggcgttcgtgt

SEQ ID NO: 4484 - RNA, 125 nt, synthetic construct
  source 1..125: mol_type = other RNA
gtttggtgactgccacgcccagttttagagctagaaatagcaagttaaaataaggctagtccgttatcaacttgaaaaagtggcaccgagtcggtgcaacaccccttgggcgtggcgactaggtg

SEQ ID NO: 4485 - RNA, 126 nt, synthetic construct
  source 1..126: mol_type = other RNA
gtttggtgactgccacgcccagttttagagctagaaatagcaagttaaaataaggctagtccgttatcaacttgaaaaagtggcaccgagtcggtgcaacaccccttgggcgtggcgacttaggtg

SEQ ID NO: 4486 - RNA, 126 nt, synthetic construct
  source 1..126: mol_type = other RNA
gtttggtgactgccacgcccagttttagagctagaaatagcaagttaaaataaggctagtccgttatcaacttgaaaaagtggcaccgagtcggtgcaacaccccttgggcgtggcgattccgggt

SEQ ID NO: 4487 - RNA, 121 nt, synthetic construct
  source 1..121: mol_type = other RNA
gtttggtgactgccacgcccagttttagagctagaaatagcaagttaaaataaggctagtccgttatcaacttgaaaaagtggcaccgagtcggtgcaacaccccttgggcgtggctgggt

SEQ ID NO: 4488 - RNA, 126 nt, synthetic construct
  source 1..126: mol_type = other RNA
gtttggtgactgccacgcccagttttagagctagaaatagcaagttaaaataaggctagtccgttatcaacttgaaaaagtggcaccgagtcggtgcaacaccccttgggcgtggcgaatccgggg

SEQ ID NO: 4489 - RNA, 126 nt, synthetic construct
  source 1..126: mol_type = other RNA
gtttggtgactgccacgcccagttttagagctagaaatagcaagttaaaataaggctagtccgttatcaacttgaaaaagtggcaccgagtcggtgcaacaccccttgggcgtggcgaagttgggg

SEQ ID NO: 4490 - RNA, 126 nt, synthetic construct
  source 1..126: mol_type = other RNA
gtttggtgactgccacgcccagttttagagctagaaatagcaagttaaaataaggctagtccgttatcaacttgaaaaagtggcaccgagtcggtgcaacaccccttgggcgtggcgatatgaggg

SEQ ID NO: 4491 - RNA, 126 nt, synthetic construct
  source 1..126: mol_type = other RNA
gtttggtgactgccacgcccagttttagagctagaaatagcaagttaaaataaggctagtccgttatcaacttgaaaaagtggcaccgagtcggtgcaacaccccttgggcgtggctaaaaaaggg

SEQ ID NO: 4492 - RNA, 126 nt, synthetic construct
  source 1..126: mol_type = other RNA
gtttggtgactgccacgcccagttttagagctagaaatagcaagttaaaataaggctagtccgttatcaacttgaaaaagtggcaccgagtcggtgcaacaccccttgggcgtggcgttagtaagg

SEQ ID NO: 4493 - RNA, 126 nt, synthetic construct
  source 1..126: mol_type = other RNA
gtttggtgactgccacgcccagttttagagctagaaatagcaagttaaaataaggctagtccgttatcaacttgaaaaagtggcaccgagtcggtgcaacaccccttgggcgtggctacattaagg

SEQ ID NO: 4494 - RNA, 126 nt, synthetic construct
  source 1..126: mol_type = other RNA
gtttggtgactgccacgcccagttttagagctagaaatagcaagttaaaataaggctagtccgttatcaacttgaaaaagtggcaccgagtcggtgcaacaccccttgggcgtggctaaatccaag

SEQ ID NO: 4495 - RNA, 126 nt, synthetic construct
  source 1..126: mol_type = other RNA
gtttggtgactgccacgcccagttttagagctagaaatagcaagttaaaataaggctagtccgttatcaacttgaaaaagtggcaccgagtcggtgcaacaccccttgggcgtggctacattcaag

SEQ ID NO: 4496 - RNA, 125 nt, synthetic construct
  source 1..125: mol_type = other RNA
gtttggtgactgccacgcccagttttagagctagaaatagcaagttaaaataaggctagtccgttatcaacttgaaaaagtggcaccgagtcggtgcaacaccccttgggcgtggctacatccaa

SEQ ID NO: 4497 - RNA, 126 nt, synthetic construct
  source 1..126: mol_type = other RNA
gtttggtgactgccacgcccagttttagagctagaaatagcaagttaaaataaggctagtccgttatcaacttgaaaaagtggcaccgagtcggtgcaacaccccttgggcgtggcgctactccaa

SEQ ID NO: 4498 - RNA, 126 nt, synthetic construct
  source 1..126: mol_type = other RNA
gtttggtgactgccacgcccagttttagagctagaaatagcaagttaaaataaggctagtccgttatcaacttgaaaaagtggcaccgagtcggtgcaacaccccttgggcgtggctagtatccca

SEQ ID NO: 4499 - RNA, 126 nt, synthetic construct
  source 1..126: mol_type = other RNA
gtttggtgactgccacgcccagttttagagctagaaatagcaagttaaaataaggctagtccgttatcaacttgaaaaagtggcaccgagtcggtgcaacaccccttgggcgtggccagtatccca

SEQ ID NO: 4500 - RNA, 122 nt, synthetic construct
  source 1..122: mol_type = other RNA
gtttggtgactgccacgcccagttttagagctagaaatagcaagttaaaataaggctagtccgttatcaacttgaaaaagtggcaccgagtcggtgcaacaccccttgggcgtggcgtgccc

SEQ ID NO: 4501 - RNA, 122 nt, synthetic construct
  source 1..122: mol_type = other RNA
gtttggtgactgccacgcccagttttagagctagaaatagcaagttaaaataaggctagtccgttatcaacttgaaaaagtggcaccgagtcggtgcaacaccccttgggcgtggcctgccc

SEQ ID NO: 4502 - RNA, 121 nt, synthetic construct
  source 1..121: mol_type = other RNA
gtttggtgactgccacgcccagttttagagctagaaatagcaagttaaaataaggctagtccgttatcaacttgaaaaagtggcaccgagtcggtgcaacaccccttgggcgtggcgcgcc

SEQ ID NO: 4503 - RNA, 122 nt, synthetic construct
  source 1..122: mol_type = other RNA
gtttggtgactgccacgcccagttttagagctagaaatagcaagttaaaataaggctagtccgttatcaacttgaaaaagtggcaccgagtcggtgcaacaccccttgggcgtggctacgcc

SEQ ID NO: 4504 - RNA, 122 nt, synthetic construct
  source 1..122: mol_type = other RNA
gtttggtgactgccacgcccagttttagagctagaaatagcaagttaaaataaggctagtccgttatcaacttgaaaaagtggcaccgagtcggtgcaacaccccttgggcgtggcctacgc

SEQ ID NO: 4505 - RNA, 124 nt, synthetic construct
  source 1..124: mol_type = other RNA
gtttggtgactgccacgcccagttttagagctagaaatagcaagttaaaataaggctagtccgttatcaacttgaaaaagtggcaccgagtcggtgcaacaccccttgggcgtggctcttacgc

SEQ ID NO: 4506 - RNA, 125 nt, synthetic construct
  source 1..125: mol_type = other RNA
gtttggtgactgccacgcccagttttagagctagaaatagcaagttaaaataaggctagtccgttatcaacttgaaaaagtggcaccgagtcggtgcaacaccccttgggcgtggcgagatcacg

SEQ ID NO: 4507 - RNA, 125 nt, synthetic construct
  source 1..125: mol_type = other RNA
gtttggtgactgccacgcccagttttagagctagaaatagcaagttaaaataaggctagtccgttatcaacttgaaaaagtggcaccgagtcggtgcaacaccccttgggcgtggctaaatcacg

SEQ ID NO: 4508 - RNA, 126 nt, synthetic construct
  source 1..126: mol_type = other RNA
gtttggtgactgccacgcccagttttagagctagaaatagcaagttaaaataaggctagtccgttatcaacttgaaaaagtggcaccgagtcggtgcaacaccccttgggcgtggcgttcccccac

SEQ ID NO: 4509 - RNA, 126 nt, synthetic construct
  source 1..126: mol_type = other RNA
gtttggtgactgccacgcccagttttagagctagaaatagcaagttaaaataaggctagtccgttatcaacttgaaaaagtggcaccgagtcggtgcaacaccccttgggcgtggcgtacccccac

SEQ ID NO: 4510 - RNA, 127 nt, synthetic construct
  source 1..127: mol_type = other RNA
gtttggtgactgccacgcccagttttagagctagaaatagcaagttaaaataaggctagtccgttatcaacttgaaaaagtggcaccgagtcggtgcaacaccccttgggcgtggcgactaggtgtt

SEQ ID NO: 4511 - RNA, 128 nt, synthetic construct
  source 1..128: mol_type = other RNA
gtttggtgactgccacgcccagttttagagctagaaatagcaagttaaaataaggctagtccgttatcaacttgaaaaagtggcaccgagtcggtgcaacaccccttgggcgtggcgacttaggtgtt

SEQ ID NO: 4512 - RNA, 124 nt, synthetic construct
  source 1..124: mol_type = other RNA
gtttggtgactgccacgcccagttttagagctagaaatagcaagttaaaataaggctagtccgttatcaacttgaaaaagtggcaccgagtcggtgcaacaccccttgggcgtggcgtgggtgt

SEQ ID NO: 4513 - RNA, 128 nt, synthetic construct
  source 1..128: mol_type = other RNA
gtttggtgactgccacgcccagttttagagctagaaatagcaagttaaaataaggctagtccgttatcaacttgaaaaagtggcaccgagtcggtgcaacaccccttgggcgtggcgattccgggtgt

SEQ ID NO: 4514 - RNA, 128 nt, synthetic construct
  source 1..128: mol_type = other RNA
gtttggtgactgccacgcccagttttagagctagaaatagcaagttaaaataaggctagtccgttatcaacttgaaaaagtggcaccgagtcggtgcaacaccccttgggcgtggcgaaagcggggtg

SEQ ID NO: 4515 - RNA, 128 nt, synthetic construct
  source 1..128: mol_type = other RNA
gtttggtgactgccacgcccagttttagagctagaaatagcaagttaaaataaggctagtccgttatcaacttgaaaaagtggcaccgagtcggtgcaacaccccttgggcgtggcgaatccggggtg

SEQ ID NO: 4516 - RNA, 128 nt, synthetic construct
  source 1..128: mol_type = other RNA
gtttggtgactgccacgcccagttttagagctagaaatagcaagttaaaataaggctagtccgttatcaacttgaaaaagtggcaccgagtcggtgcaacaccccttgggcgtggcgaaatcaggggt

SEQ ID NO: 4517 - RNA, 128 nt, synthetic construct
  source 1..128: mol_type = other RNA
gtttggtgactgccacgcccagttttagagctagaaatagcaagttaaaataaggctagtccgttatcaacttgaaaaagtggcaccgagtcggtgcaacaccccttgggcgtggcgatatcaggggt

SEQ ID NO: 4518 - RNA, 128 nt, synthetic construct
  source 1..128: mol_type = other RNA
gtttggtgactgccacgcccagttttagagctagaaatagcaagttaaaataaggctagtccgttatcaacttgaaaaagtggcaccgagtcggtgcaacaccccttgggcgtggcgaaatgaagggg

SEQ ID NO: 4519 - RNA, 128 nt, synthetic construct
  source 1..128: mol_type = other RNA
gtttggtgactgccacgcccagttttagagctagaaatagcaagttaaaataaggctagtccgttatcaacttgaaaaagtggcaccgagtcggtgcaacaccccttgggcgtggctaaatgaagggg

SEQ ID NO: 4520 - RNA, 128 nt, synthetic construct
  source 1..128: mol_type = other RNA
gtttggtgactgccacgcccagttttagagctagaaatagcaagttaaaataaggctagtccgttatcaacttgaaaaagtggcaccgagtcggtgcaacaccccttgggcgtggctaaattcaaggg

SEQ ID NO: 4521 - RNA, 128 nt, synthetic construct
  source 1..128: mol_type = other RNA
gtttggtgactgccacgcccagttttagagctagaaatagcaagttaaaataaggctagtccgttatcaacttgaaaaagtggcaccgagtcggtgcaacaccccttgggcgtggcgaaattcaaggg

SEQ ID NO: 4522 - RNA, 128 nt, synthetic construct
  source 1..128: mol_type = other RNA
gtttggtgactgccacgcccagttttagagctagaaatagcaagttaaaataaggctagtccgttatcaacttgaaaaagtggcaccgagtcggtgcaacaccccttgggcgtggctataatccaagg

SEQ ID NO: 4523 - RNA, 128 nt, synthetic construct
  source 1..128: mol_type = other RNA
gtttggtgactgccacgcccagttttagagctagaaatagcaagttaaaataaggctagtccgttatcaacttgaaaaagtggcaccgagtcggtgcaacaccccttgggcgtggcgagaatccaagg

SEQ ID NO: 4524 - RNA, 128 nt, synthetic construct
  source 1..128: mol_type = other RNA
gtttggtgactgccacgcccagttttagagctagaaatagcaagttaaaataaggctagtccgttatcaacttgaaaaagtggcaccgagtcggtgcaacaccccttgggcgtggcgctgttcccaag

SEQ ID NO: 4525 - RNA, 128 nt, synthetic construct
  source 1..128: mol_type = other RNA
gtttggtgactgccacgcccagttttagagctagaaatagcaagttaaaataaggctagtccgttatcaacttgaaaaagtggcaccgagtcggtgcaacaccccttgggcgtggctctgttcccaag

SEQ ID NO: 4526 - RNA, 128 nt, synthetic construct
  source 1..128: mol_type = other RNA
gtttggtgactgccacgcccagttttagagctagaaatagcaagttaaaataaggctagtccgttatcaacttgaaaaagtggcaccgagtcggtgcaacaccccttgggcgtggccaatgtgcccaa

SEQ ID NO: 4527 - RNA, 128 nt, synthetic construct
  source 1..128: mol_type = other RNA
gtttggtgactgccacgcccagttttagagctagaaatagcaagttaaaataaggctagtccgttatcaacttgaaaaagtggcaccgagtcggtgcaacaccccttgggcgtggcgaatgtgcccaa

SEQ ID NO: 4528 - RNA, 128 nt, synthetic construct
  source 1..128: mol_type = other RNA
gtttggtgactgccacgcccagttttagagctagaaatagcaagttaaaataaggctagtccgttatcaacttgaaaaagtggcaccgagtcggtgcaacaccccttgggcgtggcgcagttcgccca

SEQ ID NO: 4529 - RNA, 128 nt, synthetic construct
  source 1..128: mol_type = other RNA
gtttggtgactgccacgcccagttttagagctagaaatagcaagttaaaataaggctagtccgttatcaacttgaaaaagtggcaccgagtcggtgcaacaccccttgggcgtggctcagttcgccca

SEQ ID NO: 4530 - RNA, 124 nt, synthetic construct
  source 1..124: mol_type = other RNA
gtttggtgactgccacgcccagttttagagctagaaatagcaagttaaaataaggctagtccgttatcaacttgaaaaagtggcaccgagtcggtgcaacaccccttgggcgtggcttacgccc

SEQ ID NO: 4531 - RNA, 124 nt, synthetic construct
  source 1..124: mol_type = other RNA
gtttggtgactgccacgcccagttttagagctagaaatagcaagttaaaataaggctagtccgttatcaacttgaaaaagtggcaccgagtcggtgcaacaccccttgggcgtggcctacgccc

SEQ ID NO: 4532 - RNA, 127 nt, synthetic construct
  source 1..127: mol_type = other RNA
gtttggtgactgccacgcccagttttagagctagaaatagcaagttaaaataaggctagtccgttatcaacttgaaaaagtggcaccgagtcggtgcaacaccccttgggcgtggctccatcacgcc

SEQ ID NO: 4533 - RNA, 127 nt, synthetic construct
  source 1..127: mol_type = other RNA
gtttggtgactgccacgcccagttttagagctagaaatagcaagttaaaataaggctagtccgttatcaacttgaaaaagtggcaccgagtcggtgcaacaccccttgggcgtggctaaatcacgcc

SEQ ID NO: 4534 - RNA, 128 nt, synthetic construct
  source 1..128: mol_type = other RNA
gtttggtgactgccacgcccagttttagagctagaaatagcaagttaaaataaggctagtccgttatcaacttgaaaaagtggcaccgagtcggtgcaacaccccttgggcgtggcgtctccccacgc

SEQ ID NO: 4535 - RNA, 128 nt, synthetic construct
  source 1..128: mol_type = other RNA
gtttggtgactgccacgcccagttttagagctagaaatagcaagttaaaataaggctagtccgttatcaacttgaaaaagtggcaccgagtcggtgcaacaccccttgggcgtggcgtcgccccacgc

SEQ ID NO: 4536 - RNA, 127 nt, synthetic construct
  source 1..127: mol_type = other RNA
gtttggtgactgccacgcccagttttagagctagaaatagcaagttaaaataaggctagtccgttatcaacttgaaaaagtggcaccgagtcggtgcaacaccccttgggcgtggctaatggccacg

SEQ ID NO: 4537 - RNA, 127 nt, synthetic construct
  source 1..127: mol_type = other RNA
gtttggtgactgccacgcccagttttagagctagaaatagcaagttaaaataaggctagtccgttatcaacttgaaaaagtggcaccgagtcggtgcaacaccccttgggcgtggctcatggccacg

SEQ ID NO: 4538 - RNA, 130 nt, synthetic construct
  source 1..130: mol_type = other RNA
gtttggtgactgccacgcccagttttagagctagaaatagcaagttaaaataaggctagtccgttatcaacttgaaaaagtggcaccgagtcggtgcaacaccccttgggcgtggcgaaagcggggtgtt

SEQ ID NO: 4539 - RNA, 130 nt, synthetic construct
  source 1..130: mol_type = other RNA
gtttggtgactgccacgcccagttttagagctagaaatagcaagttaaaataaggctagtccgttatcaacttgaaaaagtggcaccgagtcggtgcaacaccccttgggcgtggcgaatccggggtgtt

SEQ ID NO: 4540 - RNA, 130 nt, synthetic construct
  source 1..130: mol_type = other RNA
gtttggtgactgccacgcccagttttagagctagaaatagcaagttaaaataaggctagtccgttatcaacttgaaaaagtggcaccgagtcggtgcaacaccccttgggcgtggcgaaatcaggggtgt

SEQ ID NO: 4541 - RNA, 130 nt, synthetic construct
  source 1..130: mol_type = other RNA
gtttggtgactgccacgcccagttttagagctagaaatagcaagttaaaataaggctagtccgttatcaacttgaaaaagtggcaccgagtcggtgcaacaccccttgggcgtggcgatatcaggggtgt

SEQ ID NO: 4542 - RNA, 130 nt, synthetic construct
  source 1..130: mol_type = other RNA
gtttggtgactgccacgcccagttttagagctagaaatagcaagttaaaataaggctagtccgttatcaacttgaaaaagtggcaccgagtcggtgcaacaccccttgggcgtggctaaatgaaggggtg

SEQ ID NO: 4543 - RNA, 130 nt, synthetic construct
  source 1..130: mol_type = other RNA
gtttggtgactgccacgcccagttttagagctagaaatagcaagttaaaataaggctagtccgttatcaacttgaaaaagtggcaccgagtcggtgcaacaccccttgggcgtggcgaaatgaaggggtg

SEQ ID NO: 4544 - RNA, 130 nt, synthetic construct
  source 1..130: mol_type = other RNA
gtttggtgactgccacgcccagttttagagctagaaatagcaagttaaaataaggctagtccgttatcaacttgaaaaagtggcaccgagtcggtgcaacaccccttgggcgtggctaaattcaaggggt

SEQ ID NO: 4545 - RNA, 130 nt, synthetic construct
  source 1..130: mol_type = other RNA
gtttggtgactgccacgcccagttttagagctagaaatagcaagttaaaataaggctagtccgttatcaacttgaaaaagtggcaccgagtcggtgcaacaccccttgggcgtggcgaaattcaaggggt

SEQ ID NO: 4546 - RNA, 130 nt, synthetic construct
  source 1..130: mol_type = other RNA
gtttggtgactgccacgcccagttttagagctagaaatagcaagttaaaataaggctagtccgttatcaacttgaaaaagtggcaccgagtcggtgcaacaccccttgggcgtggccctaatccaagggg

SEQ ID NO: 4547 - RNA, 130 nt, synthetic construct
  source 1..130: mol_type = other RNA
gtttggtgactgccacgcccagttttagagctagaaatagcaagttaaaataaggctagtccgttatcaacttgaaaaagtggcaccgagtcggtgcaacaccccttgggcgtggccattatccaagggg

SEQ ID NO: 4548 - RNA, 130 nt, synthetic construct
  source 1..130: mol_type = other RNA
gtttggtgactgccacgcccagttttagagctagaaatagcaagttaaaataaggctagtccgttatcaacttgaaaaagtggcaccgagtcggtgcaacaccccttgggcgtggccctgttcccaaggg

SEQ ID NO: 4549 - RNA, 130 nt, synthetic construct
  source 1..130: mol_type = other RNA
gtttggtgactgccacgcccagttttagagctagaaatagcaagttaaaataaggctagtccgttatcaacttgaaaaagtggcaccgagtcggtgcaacaccccttgggcgtggcgctgttcccaaggg

SEQ ID NO: 4550 - RNA, 130 nt, synthetic construct
  source 1..130: mol_type = other RNA
gtttggtgactgccacgcccagttttagagctagaaatagcaagttaaaataaggctagtccgttatcaacttgaaaaagtggcaccgagtcggtgcaacaccccttgggcgtggcctatgtgcccaagg

SEQ ID NO: 4551 - RNA, 130 nt, synthetic construct
  source 1..130: mol_type = other RNA
gtttggtgactgccacgcccagttttagagctagaaatagcaagttaaaataaggctagtccgttatcaacttgaaaaagtggcaccgagtcggtgcaacaccccttgggcgtggcgtatgtgcccaagg

SEQ ID NO: 4552 - RNA, 130 nt, synthetic construct
  source 1..130: mol_type = other RNA
gtttggtgactgccacgcccagttttagagctagaaatagcaagttaaaataaggctagtccgttatcaacttgaaaaagtggcaccgagtcggtgcaacaccccttgggcgtggcgacgttcgcccaag

SEQ ID NO: 4553 - RNA, 130 nt, synthetic construct
  source 1..130: mol_type = other RNA
gtttggtgactgccacgcccagttttagagctagaaatagcaagttaaaataaggctagtccgttatcaacttgaaaaagtggcaccgagtcggtgcaacaccccttgggcgtggctctgttcgcccaag

SEQ ID NO: 4554 - RNA, 126 nt, synthetic construct
  source 1..126: mol_type = other RNA
gtttggtgactgccacgcccagttttagagctagaaatagcaagttaaaataaggctagtccgttatcaacttgaaaaagtggcaccgagtcggtgcaacaccccttgggcgtggcgtacgcccaa

SEQ ID NO: 4555 - RNA, 126 nt, synthetic construct
  source 1..126: mol_type = other RNA
gtttggtgactgccacgcccagttttagagctagaaatagcaagttaaaataaggctagtccgttatcaacttgaaaaagtggcaccgagtcggtgcaacaccccttgggcgtggcttacgcccaa

SEQ ID NO: 4556 - RNA, 129 nt, synthetic construct
  source 1..129: mol_type = other RNA
gtttggtgactgccacgcccagttttagagctagaaatagcaagttaaaataaggctagtccgttatcaacttgaaaaagtggcaccgagtcggtgcaacaccccttgggcgtggcgcaatcacgccca

SEQ ID NO: 4557 - RNA, 129 nt, synthetic construct
  source 1..129: mol_type = other RNA
gtttggtgactgccacgcccagttttagagctagaaatagcaagttaaaataaggctagtccgttatcaacttgaaaaagtggcaccgagtcggtgcaacaccccttgggcgtggccctatcacgccca

SEQ ID NO: 4558 - RNA, 130 nt, synthetic construct
  source 1..130: mol_type = other RNA
gtttggtgactgccacgcccagttttagagctagaaatagcaagttaaaataaggctagtccgttatcaacttgaaaaagtggcaccgagtcggtgcaacaccccttgggcgtggcgttcccccacgccc

SEQ ID NO: 4559 - RNA, 130 nt, synthetic construct
  source 1..130: mol_type = other RNA
gtttggtgactgccacgcccagttttagagctagaaatagcaagttaaaataaggctagtccgttatcaacttgaaaaagtggcaccgagtcggtgcaacaccccttgggcgtggcgtaaccccacgccc

SEQ ID NO: 4560 - RNA, 129 nt, synthetic construct
  source 1..129: mol_type = other RNA
gtttggtgactgccacgcccagttttagagctagaaatagcaagttaaaataaggctagtccgttatcaacttgaaaaagtggcaccgagtcggtgcaacaccccttgggcgtggctcctggccacgcc

SEQ ID NO: 4561 - RNA, 129 nt, synthetic construct
  source 1..129: mol_type = other RNA
gtttggtgactgccacgcccagttttagagctagaaatagcaagttaaaataaggctagtccgttatcaacttgaaaaagtggcaccgagtcggtgcaacaccccttgggcgtggctcaaggccacgcc

SEQ ID NO: 4562 - RNA, 122 nt, synthetic construct
  source 1..122: mol_type = other RNA
gtttggtgactgccacgcccagttttagagctagaaatagcaagttaaaataaggctagtccgttatcaacttgaaaaagtggcaccgagtcggtgcaacaccccttgggcgtggcagtcac

SEQ ID NO: 4563 - RNA, 128 nt, synthetic construct
  source 1..128: mol_type = other RNA
gtttggtgactgccacgcccagttttagagctagaaatagcaagttaaaataaggctagtccgttatcaacttgaaaaagtggcaccgagtcggtgcaacaccccttgggcgtggcagtcacagtgtt

SEQ ID NO: 4564 - RNA, 132 nt, synthetic construct
  source 1..132: mol_type = other RNA
gtttggtgactgccacgcccagttttagagctagaaatagcaagttaaaataaggctagtccgttatcaacttgaaaaagtggcaccgagtcggtgcaacaccccttgggcgtggcagtcacttatcgtgtt

SEQ ID NO: 4565 - RNA, 127 nt, synthetic construct
  source 1..127: mol_type = other RNA
gtttggtgactgccacgcccagttttagagctagaaatagcaagttaaaataaggctagtccgttatcaacttgaaaaagtggcaccgagtcggtgcaacaccccttgggcgtggcagtcacagtgt

SEQ ID NO: 4566 - RNA, 131 nt, synthetic construct
  source 1..131: mol_type = other RNA
gtttggtgactgccacgcccagttttagagctagaaatagcaagttaaaataaggctagtccgttatcaacttgaaaaagtggcaccgagtcggtgcaacaccccttgggcgtggcagtcactcaccgtgt

SEQ ID NO: 4567 - RNA, 132 nt, synthetic construct
  source 1..132: mol_type = other RNA
gtttggtgactgccacgcccagttttagagctagaaatagcaagttaaaataaggctagtccgttatcaacttgaaaaagtggcaccgagtcggtgcaacaccccttgggcgtggcagtcactgtgtcggtg

SEQ ID NO: 4568 - RNA, 132 nt, synthetic construct
  source 1..132: mol_type = other RNA
gtttggtgactgccacgcccagttttagagctagaaatagcaagttaaaataaggctagtccgttatcaacttgaaaaagtggcaccgagtcggtgcaacaccccttgggcgtggcagtcacttatcaggtg

SEQ ID NO: 4569 - RNA, 132 nt, synthetic construct
  source 1..132: mol_type = other RNA
gtttggtgactgccacgcccagttttagagctagaaatagcaagttaaaataaggctagtccgttatcaacttgaaaaagtggcaccgagtcggtgcaacaccccttgggcgtggcagtcactgatctgggt

SEQ ID NO: 4570 - RNA, 132 nt, synthetic construct
  source 1..132: mol_type = other RNA
gtttggtgactgccacgcccagttttagagctagaaatagcaagttaaaataaggctagtccgttatcaacttgaaaaagtggcaccgagtcggtgcaacaccccttgggcgtggcagtcacttgaccgggt

SEQ ID NO: 4571 - RNA, 132 nt, synthetic construct
  source 1..132: mol_type = other RNA
gtttggtgactgccacgcccagttttagagctagaaatagcaagttaaaataaggctagtccgttatcaacttgaaaaagtggcaccgagtcggtgcaacaccccttgggcgtggcagtcacttagtcgggg

SEQ ID NO: 4572 - RNA, 132 nt, synthetic construct
  source 1..132: mol_type = other RNA
gtttggtgactgccacgcccagttttagagctagaaatagcaagttaaaataaggctagtccgttatcaacttgaaaaagtggcaccgagtcggtgcaacaccccttgggcgtggcagtcacttggtcgggg

SEQ ID NO: 4573 - RNA, 132 nt, synthetic construct
  source 1..132: mol_type = other RNA
gtttggtgactgccacgcccagttttagagctagaaatagcaagttaaaataaggctagtccgttatcaacttgaaaaagtggcaccgagtcggtgcaacaccccttgggcgtggcagtcacttatgtaggg

SEQ ID NO: 4574 - RNA, 132 nt, synthetic construct
  source 1..132: mol_type = other RNA
gtttggtgactgccacgcccagttttagagctagaaatagcaagttaaaataaggctagtccgttatcaacttgaaaaagtggcaccgagtcggtgcaacaccccttgggcgtggcagtcacttatgcaggg

SEQ ID NO: 4575 - RNA, 132 nt, synthetic construct
  source 1..132: mol_type = other RNA
gtttggtgactgccacgcccagttttagagctagaaatagcaagttaaaataaggctagtccgttatcaacttgaaaaagtggcaccgagtcggtgcaacaccccttgggcgtggcagtcacagagataagg

SEQ ID NO: 4576 - RNA, 132 nt, synthetic construct
  source 1..132: mol_type = other RNA
gtttggtgactgccacgcccagttttagagctagaaatagcaagttaaaataaggctagtccgttatcaacttgaaaaagtggcaccgagtcggtgcaacaccccttgggcgtggcagtcactgatataagg

SEQ ID NO: 4577 - RNA, 132 nt, synthetic construct
  source 1..132: mol_type = other RNA
gtttggtgactgccacgcccagttttagagctagaaatagcaagttaaaataaggctagtccgttatcaacttgaaaaagtggcaccgagtcggtgcaacaccccttgggcgtggcagtcacatcattcaag

SEQ ID NO: 4578 - RNA, 132 nt, synthetic construct
  source 1..132: mol_type = other RNA
gtttggtgactgccacgcccagttttagagctagaaatagcaagttaaaataaggctagtccgttatcaacttgaaaaagtggcaccgagtcggtgcaacaccccttgggcgtggcagtcacatcaatcaag

SEQ ID NO: 4579 - RNA, 131 nt, synthetic construct
  source 1..131: mol_type = other RNA
gtttggtgactgccacgcccagttttagagctagaaatagcaagttaaaataaggctagtccgttatcaacttgaaaaagtggcaccgagtcggtgcaacaccccttgggcgtggcagtcacatcatccaa

SEQ ID NO: 4580 - RNA, 132 nt, synthetic construct
  source 1..132: mol_type = other RNA
gtttggtgactgccacgcccagttttagagctagaaatagcaagttaaaataaggctagtccgttatcaacttgaaaaagtggcaccgagtcggtgcaacaccccttgggcgtggcagtcactcagttccaa

SEQ ID NO: 4581 - RNA, 131 nt, synthetic construct
  source 1..131: mol_type = other RNA
gtttggtgactgccacgcccagttttagagctagaaatagcaagttaaaataaggctagtccgttatcaacttgaaaaagtggcaccgagtcggtgcaacaccccttgggcgtggcagtcacagttcccca

SEQ ID NO: 4582 - RNA, 132 nt, synthetic construct
  source 1..132: mol_type = other RNA
gtttggtgactgccacgcccagttttagagctagaaatagcaagttaaaataaggctagtccgttatcaacttgaaaaagtggcaccgagtcggtgcaacaccccttgggcgtggcagtcacagtatcccca

SEQ ID NO: 4583 - RNA, 131 nt, synthetic construct
  source 1..131: mol_type = other RNA
gtttggtgactgccacgcccagttttagagctagaaatagcaagttaaaataaggctagtccgttatcaacttgaaaaagtggcaccgagtcggtgcaacaccccttgggcgtggcagtcacaggtagccc

SEQ ID NO: 4584 - RNA, 130 nt, synthetic construct
  source 1..130: mol_type = other RNA
gtttggtgactgccacgcccagttttagagctagaaatagcaagttaaaataaggctagtccgttatcaacttgaaaaagtggcaccgagtcggtgcaacaccccttgggcgtggcagtcacttcagccc

SEQ ID NO: 4585 - RNA, 132 nt, synthetic construct
  source 1..132: mol_type = other RNA
gtttggtgactgccacgcccagttttagagctagaaatagcaagttaaaataaggctagtccgttatcaacttgaaaaagtggcaccgagtcggtgcaacaccccttgggcgtggcagtcacacagttcgcc

SEQ ID NO: 4586 - RNA, 130 nt, synthetic construct
  source 1..130: mol_type = other RNA
gtttggtgactgccacgcccagttttagagctagaaatagcaagttaaaataaggctagtccgttatcaacttgaaaaagtggcaccgagtcggtgcaacaccccttgggcgtggcagtcacagttcgcc

SEQ ID NO: 4587 - RNA, 132 nt, synthetic construct
  source 1..132: mol_type = other RNA
gtttggtgactgccacgcccagttttagagctagaaatagcaagttaaaataaggctagtccgttatcaacttgaaaaagtggcaccgagtcggtgcaacaccccttgggcgtggcagtcacagaattacgc

SEQ ID NO: 4588 - RNA, 132 nt, synthetic construct
  source 1..132: mol_type = other RNA
gtttggtgactgccacgcccagttttagagctagaaatagcaagttaaaataaggctagtccgttatcaacttgaaaaagtggcaccgagtcggtgcaacaccccttgggcgtggcagtcacttcattacgc

SEQ ID NO: 4589 - RNA, 132 nt, synthetic construct
  source 1..132: mol_type = other RNA
gtttggtgactgccacgcccagttttagagctagaaatagcaagttaaaataaggctagtccgttatcaacttgaaaaagtggcaccgagtcggtgcaacaccccttgggcgtggcagtcacacaaatcacg

SEQ ID NO: 4590 - RNA, 132 nt, synthetic construct
  source 1..132: mol_type = other RNA
gtttggtgactgccacgcccagttttagagctagaaatagcaagttaaaataaggctagtccgttatcaacttgaaaaagtggcaccgagtcggtgcaacaccccttgggcgtggcagtcacagtaatcacg

SEQ ID NO: 4591 - RNA, 132 nt, synthetic construct
  source 1..132: mol_type = other RNA
gtttggtgactgccacgcccagttttagagctagaaatagcaagttaaaataaggctagtccgttatcaacttgaaaaagtggcaccgagtcggtgcaacaccccttgggcgtggcagtcacttagttccac

SEQ ID NO: 4592 - RNA, 132 nt, synthetic construct
  source 1..132: mol_type = other RNA
gtttggtgactgccacgcccagttttagagctagaaatagcaagttaaaataaggctagtccgttatcaacttgaaaaagtggcaccgagtcggtgcaacaccccttgggcgtggcagtcacatagttccac

SEQ ID NO: 4593 - RNA, 132 nt, synthetic construct
  source 1..132: mol_type = other RNA
gtttggtgactgccacgcccagttttagagctagaaatagcaagttaaaataaggctagtccgttatcaacttgaaaaagtggcaccgagtcggtgcaacaccccttgggcgtggcagtcacttgttagcca

SEQ ID NO: 4594 - RNA, 131 nt, synthetic construct
  source 1..131: mol_type = other RNA
gtttggtgactgccacgcccagttttagagctagaaatagcaagttaaaataaggctagtccgttatcaacttgaaaaagtggcaccgagtcggtgcaacaccccttgggcgtggcagtcacagtcagcca

SEQ ID NO: 4595 - RNA, 132 nt, synthetic construct
  source 1..132: mol_type = other RNA
gtttggtgactgccacgcccagttttagagctagaaatagcaagttaaaataaggctagtccgttatcaacttgaaaaagtggcaccgagtcggtgcaacaccccttgggcgtggcagtcacgcttcttgcc

SEQ ID NO: 4596 - RNA, 132 nt, synthetic construct
  source 1..132: mol_type = other RNA
gtttggtgactgccacgcccagttttagagctagaaatagcaagttaaaataaggctagtccgttatcaacttgaaaaagtggcaccgagtcggtgcaacaccccttgggcgtggcagtcacgtaccttgcc

SEQ ID NO: 4597 - RNA, 130 nt, synthetic construct
  source 1..130: mol_type = other RNA
gtttggtgactgccacgcccagttttagagctagaaatagcaagttaaaataaggctagtccgttatcaacttgaaaaagtggcaccgagtcggtgcaacaccccttgggcgtggcagtcacttgcctgc

SEQ ID NO: 4598 - RNA, 131 nt, synthetic construct
  source 1..131: mol_type = other RNA
gtttggtgactgccacgcccagttttagagctagaaatagcaagttaaaataaggctagtccgttatcaacttgaaaaagtggcaccgagtcggtgcaacaccccttgggcgtggcagtcacttatactgc

SEQ ID NO: 4599 - RNA, 132 nt, synthetic construct
  source 1..132: mol_type = other RNA
gtttggtgactgccacgcccagttttagagctagaaatagcaagttaaaataaggctagtccgttatcaacttgaaaaagtggcaccgagtcggtgcaacaccccttgggcgtggcagtcacagtgatactg

SEQ ID NO: 4600 - RNA, 132 nt, synthetic construct
  source 1..132: mol_type = other RNA
gtttggtgactgccacgcccagttttagagctagaaatagcaagttaaaataaggctagtccgttatcaacttgaaaaagtggcaccgagtcggtgcaacaccccttgggcgtggcagtcacagtactactg

SEQ ID NO: 4601 - RNA, 131 nt, synthetic construct
  source 1..131: mol_type = other RNA
gtttggtgactgccacgcccagttttagagctagaaatagcaagttaaaataaggctagtccgttatcaacttgaaaaagtggcaccgagtcggtgcaacaccccttgggcgtggcagtcacttcgggact

SEQ ID NO: 4602 - RNA, 131 nt, synthetic construct
  source 1..131: mol_type = other RNA
gtttggtgactgccacgcccagttttagagctagaaatagcaagttaaaataaggctagtccgttatcaacttgaaaaagtggcaccgagtcggtgcaacaccccttgggcgtggcagtcactcgtggact

SEQ ID NO: 4603 - RNA, 132 nt, synthetic construct
  source 1..132: mol_type = other RNA
gtttggtgactgccacgcccagttttagagctagaaatagcaagttaaaataaggctagtccgttatcaacttgaaaaagtggcaccgagtcggtgcaacaccccttgggcgtggcagtcacgtactctgac

SEQ ID NO: 4604 - RNA, 132 nt, synthetic construct
  source 1..132: mol_type = other RNA
gtttggtgactgccacgcccagttttagagctagaaatagcaagttaaaataaggctagtccgttatcaacttgaaaaagtggcaccgagtcggtgcaacaccccttgggcgtggcagtcacgtattctgac

SEQ ID NO: 4605 - RNA, 131 nt, synthetic construct
  source 1..131: mol_type = other RNA
gtttggtgactgccacgcccagttttagagctagaaatagcaagttaaaataaggctagtccgttatcaacttgaaaaagtggcaccgagtcggtgcaacaccccttgggcgtggcagtcacagtgtgtga

SEQ ID NO: 4606 - RNA, 131 nt, synthetic construct
  source 1..131: mol_type = other RNA
gtttggtgactgccacgcccagttttagagctagaaatagcaagttaaaataaggctagtccgttatcaacttgaaaaagtggcaccgagtcggtgcaacaccccttgggcgtggcagtcactgaaagtga

SEQ ID NO: 4607 - RNA, 134 nt, synthetic construct
  source 1..134: mol_type = other RNA
gtttggtgactgccacgcccagttttagagctagaaatagcaagttaaaataaggctagtccgttatcaacttgaaaaagtggcaccgagtcggtgcaacaccccttgggcgtggcagtcactgtgtcggtgtt

SEQ ID NO: 4608 - RNA, 134 nt, synthetic construct
  source 1..134: mol_type = other RNA
gtttggtgactgccacgcccagttttagagctagaaatagcaagttaaaataaggctagtccgttatcaacttgaaaaagtggcaccgagtcggtgcaacaccccttgggcgtggcagtcacttatcaggtgtt

SEQ ID NO: 4609 - RNA, 134 nt, synthetic construct
  source 1..134: mol_type = other RNA
gtttggtgactgccacgcccagttttagagctagaaatagcaagttaaaataaggctagtccgttatcaacttgaaaaagtggcaccgagtcggtgcaacaccccttgggcgtggcagtcactgatctgggtgt

SEQ ID NO: 4610 - RNA, 133 nt, synthetic construct
  source 1..133: mol_type = other RNA
gtttggtgactgccacgcccagttttagagctagaaatagcaagttaaaataaggctagtccgttatcaacttgaaaaagtggcaccgagtcggtgcaacaccccttgggcgtggcagtcactgttagggtgt

SEQ ID NO: 4611 - RNA, 134 nt, synthetic construct
  source 1..134: mol_type = other RNA
gtttggtgactgccacgcccagttttagagctagaaatagcaagttaaaataaggctagtccgttatcaacttgaaaaagtggcaccgagtcggtgcaacaccccttgggcgtggcagtcactggagcggggtg

SEQ ID NO: 4612 - RNA, 134 nt, synthetic construct
  source 1..134: mol_type = other RNA
gtttggtgactgccacgcccagttttagagctagaaatagcaagttaaaataaggctagtccgttatcaacttgaaaaagtggcaccgagtcggtgcaacaccccttgggcgtggcagtcactgaagcggggtg

SEQ ID NO: 4613 - RNA, 134 nt, synthetic construct
  source 1..134: mol_type = other RNA
gtttggtgactgccacgcccagttttagagctagaaatagcaagttaaaataaggctagtccgttatcaacttgaaaaagtggcaccgagtcggtgcaacaccccttgggcgtggcagtcacttgagcaggggt

SEQ ID NO: 4614 - RNA, 134 nt, synthetic construct
  source 1..134: mol_type = other RNA
gtttggtgactgccacgcccagttttagagctagaaatagcaagttaaaataaggctagtccgttatcaacttgaaaaagtggcaccgagtcggtgcaacaccccttgggcgtggcagtcacttaagcaggggt

SEQ ID NO: 4615 - RNA, 134 nt, synthetic construct
  source 1..134: mol_type = other RNA
gtttggtgactgccacgcccagttttagagctagaaatagcaagttaaaataaggctagtccgttatcaacttgaaaaagtggcaccgagtcggtgcaacaccccttgggcgtggcagtcacagaggtaagggg

SEQ ID NO: 4616 - RNA, 134 nt, synthetic construct
  source 1..134: mol_type = other RNA
gtttggtgactgccacgcccagttttagagctagaaatagcaagttaaaataaggctagtccgttatcaacttgaaaaagtggcaccgagtcggtgcaacaccccttgggcgtggcagtcactgatataagggg

SEQ ID NO: 4617 - RNA, 134 nt, synthetic construct
  source 1..134: mol_type = other RNA
gtttggtgactgccacgcccagttttagagctagaaatagcaagttaaaataaggctagtccgttatcaacttgaaaaagtggcaccgagtcggtgcaacaccccttgggcgtggcagtcacagaattcaaggg

SEQ ID NO: 4618 - RNA, 134 nt, synthetic construct
  source 1..134: mol_type = other RNA
gtttggtgactgccacgcccagttttagagctagaaatagcaagttaaaataaggctagtccgttatcaacttgaaaaagtggcaccgagtcggtgcaacaccccttgggcgtggcagtcacttaattcaaggg

SEQ ID NO: 4619 - RNA, 134 nt, synthetic construct
  source 1..134: mol_type = other RNA
gtttggtgactgccacgcccagttttagagctagaaatagcaagttaaaataaggctagtccgttatcaacttgaaaaagtggcaccgagtcggtgcaacaccccttgggcgtggcagtcacagatatccaagg

SEQ ID NO: 4620 - RNA, 134 nt, synthetic construct
  source 1..134: mol_type = other RNA
gtttggtgactgccacgcccagttttagagctagaaatagcaagttaaaataaggctagtccgttatcaacttgaaaaagtggcaccgagtcggtgcaacaccccttgggcgtggcagtcactctaatccaagg

SEQ ID NO: 4621 - RNA, 134 nt, synthetic construct
  source 1..134: mol_type = other RNA
gtttggtgactgccacgcccagttttagagctagaaatagcaagttaaaataaggctagtccgttatcaacttgaaaaagtggcaccgagtcggtgcaacaccccttgggcgtggcagtcacagatcccccaag

SEQ ID NO: 4622 - RNA, 134 nt, synthetic construct
  source 1..134: mol_type = other RNA
gtttggtgactgccacgcccagttttagagctagaaatagcaagttaaaataaggctagtccgttatcaacttgaaaaagtggcaccgagtcggtgcaacaccccttgggcgtggcagtcactcttatcccaag

SEQ ID NO: 4623 - RNA, 134 nt, synthetic construct
  source 1..134: mol_type = other RNA
gtttggtgactgccacgcccagttttagagctagaaatagcaagttaaaataaggctagtccgttatcaacttgaaaaagtggcaccgagtcggtgcaacaccccttgggcgtggcagtcacggatcagcccaa

SEQ ID NO: 4624 - RNA, 134 nt, synthetic construct
  source 1..134: mol_type = other RNA
gtttggtgactgccacgcccagttttagagctagaaatagcaagttaaaataaggctagtccgttatcaacttgaaaaagtggcaccgagtcggtgcaacaccccttgggcgtggcagtcacattctagcccaa

SEQ ID NO: 4625 - RNA, 134 nt, synthetic construct
  source 1..134: mol_type = other RNA
gtttggtgactgccacgcccagttttagagctagaaatagcaagttaaaataaggctagtccgttatcaacttgaaaaagtggcaccgagtcggtgcaacaccccttgggcgtggcagtcacggaatccgccca

SEQ ID NO: 4626 - RNA, 134 nt, synthetic construct
  source 1..134: mol_type = other RNA
gtttggtgactgccacgcccagttttagagctagaaatagcaagttaaaataaggctagtccgttatcaacttgaaaaagtggcaccgagtcggtgcaacaccccttgggcgtggcagtcacataatccgccca

SEQ ID NO: 4627 - RNA, 134 nt, synthetic construct
  source 1..134: mol_type = other RNA
gtttggtgactgccacgcccagttttagagctagaaatagcaagttaaaataaggctagtccgttatcaacttgaaaaagtggcaccgagtcggtgcaacaccccttgggcgtggcagtcacggaattacgccc

SEQ ID NO: 4628 - RNA, 134 nt, synthetic construct
  source 1..134: mol_type = other RNA
gtttggtgactgccacgcccagttttagagctagaaatagcaagttaaaataaggctagtccgttatcaacttgaaaaagtggcaccgagtcggtgcaacaccccttgggcgtggcagtcacataattacgccc

SEQ ID NO: 4629 - RNA, 134 nt, synthetic construct
  source 1..134: mol_type = other RNA
gtttggtgactgccacgcccagttttagagctagaaatagcaagttaaaataaggctagtccgttatcaacttgaaaaagtggcaccgagtcggtgcaacaccccttgggcgtggcagtcacggtaatcacgcc

SEQ ID NO: 4630 - RNA, 134 nt, synthetic construct
  source 1..134: mol_type = other RNA
gtttggtgactgccacgcccagttttagagctagaaatagcaagttaaaataaggctagtccgttatcaacttgaaaaagtggcaccgagtcggtgcaacaccccttgggcgtggcagtcacttaaatcacgcc

SEQ ID NO: 4631 - RNA, 134 nt, synthetic construct
  source 1..134: mol_type = other RNA
gtttggtgactgccacgcccagttttagagctagaaatagcaagttaaaataaggctagtccgttatcaacttgaaaaagtggcaccgagtcggtgcaacaccccttgggcgtggcagtcacgtagttccacgc

SEQ ID NO: 4632 - RNA, 134 nt, synthetic construct
  source 1..134: mol_type = other RNA
gtttggtgactgccacgcccagttttagagctagaaatagcaagttaaaataaggctagtccgttatcaacttgaaaaagtggcaccgagtcggtgcaacaccccttgggcgtggcagtcacttagttccacgc

SEQ ID NO: 4633 - RNA, 134 nt, synthetic construct
  source 1..134: mol_type = other RNA
gtttggtgactgccacgcccagttttagagctagaaatagcaagttaaaataaggctagtccgttatcaacttgaaaaagtggcaccgagtcggtgcaacaccccttgggcgtggcagtcacgtatgggccacg

SEQ ID NO: 4634 - RNA, 134 nt, synthetic construct
  source 1..134: mol_type = other RNA
gtttggtgactgccacgcccagttttagagctagaaatagcaagttaaaataaggctagtccgttatcaacttgaaaaagtggcaccgagtcggtgcaacaccccttgggcgtggcagtcacacatgggccacg

SEQ ID NO: 4635 - RNA, 134 nt, synthetic construct
  source 1..134: mol_type = other RNA
gtttggtgactgccacgcccagttttagagctagaaatagcaagttaaaataaggctagtccgttatcaacttgaaaaagtggcaccgagtcggtgcaacaccccttgggcgtggcagtcacgtatcttgccac

SEQ ID NO: 4636 - RNA, 134 nt, synthetic construct
  source 1..134: mol_type = other RNA
gtttggtgactgccacgcccagttttagagctagaaatagcaagttaaaataaggctagtccgttatcaacttgaaaaagtggcaccgagtcggtgcaacaccccttgggcgtggcagtcacttctcttgccac

SEQ ID NO: 4637 - RNA, 134 nt, synthetic construct
  source 1..134: mol_type = other RNA
gtttggtgactgccacgcccagttttagagctagaaatagcaagttaaaataaggctagtccgttatcaacttgaaaaagtggcaccgagtcggtgcaacaccccttgggcgtggcagtcacagtgatactgcc

SEQ ID NO: 4638 - RNA, 134 nt, synthetic construct
  source 1..134: mol_type = other RNA
gtttggtgactgccacgcccagttttagagctagaaatagcaagttaaaataaggctagtccgttatcaacttgaaaaagtggcaccgagtcggtgcaacaccccttgggcgtggcagtcacagtgctactgcc

SEQ ID NO: 4639 - RNA, 133 nt, synthetic construct
  source 1..133: mol_type = other RNA
gtttggtgactgccacgcccagttttagagctagaaatagcaagttaaaataaggctagtccgttatcaacttgaaaaagtggcaccgagtcggtgcaacaccccttgggcgtggcagtcactcagggactgc

SEQ ID NO: 4640 - RNA, 133 nt, synthetic construct
  source 1..133: mol_type = other RNA
gtttggtgactgccacgcccagttttagagctagaaatagcaagttaaaataaggctagtccgttatcaacttgaaaaagtggcaccgagtcggtgcaacaccccttgggcgtggcagtcacttcgggactgc

SEQ ID NO: 4641 - RNA, 134 nt, synthetic construct
  source 1..134: mol_type = other RNA
gtttggtgactgccacgcccagttttagagctagaaatagcaagttaaaataaggctagtccgttatcaacttgaaaaagtggcaccgagtcggtgcaacaccccttgggcgtggcagtcacgttctctgactg

SEQ ID NO: 4642 - RNA, 134 nt, synthetic construct
  source 1..134: mol_type = other RNA
gtttggtgactgccacgcccagttttagagctagaaatagcaagttaaaataaggctagtccgttatcaacttgaaaaagtggcaccgagtcggtgcaacaccccttgggcgtggcagtcacgtaatctgactg

SEQ ID NO: 4643 - RNA, 133 nt, synthetic construct
  source 1..133: mol_type = other RNA
gtttggtgactgccacgcccagttttagagctagaaatagcaagttaaaataaggctagtccgttatcaacttgaaaaagtggcaccgagtcggtgcaacaccccttgggcgtggcagtcacacagtgtgact

SEQ ID NO: 4644 - RNA, 133 nt, synthetic construct
  source 1..133: mol_type = other RNA
gtttggtgactgccacgcccagttttagagctagaaatagcaagttaaaataaggctagtccgttatcaacttgaaaaagtggcaccgagtcggtgcaacaccccttgggcgtggcagtcactcccagtgact

SEQ ID NO: 4645 - RNA, 136 nt, synthetic construct
  source 1..136: mol_type = other RNA
gtttggtgactgccacgcccagttttagagctagaaatagcaagttaaaataaggctagtccgttatcaacttgaaaaagtggcaccgagtcggtgcaacaccccttgggcgtggcagtcactggagcggggtgtt

SEQ ID NO: 4646 - RNA, 136 nt, synthetic construct
  source 1..136: mol_type = other RNA
gtttggtgactgccacgcccagttttagagctagaaatagcaagttaaaataaggctagtccgttatcaacttgaaaaagtggcaccgagtcggtgcaacaccccttgggcgtggcagtcactgaagcggggtgtt

SEQ ID NO: 4647 - RNA, 136 nt, synthetic construct
  source 1..136: mol_type = other RNA
gtttggtgactgccacgcccagttttagagctagaaatagcaagttaaaataaggctagtccgttatcaacttgaaaaagtggcaccgagtcggtgcaacaccccttgggcgtggcagtcacttgggcaggggtgt

SEQ ID NO: 4648 - RNA, 136 nt, synthetic construct
  source 1..136: mol_type = other RNA
gtttggtgactgccacgcccagttttagagctagaaatagcaagttaaaataaggctagtccgttatcaacttgaaaaagtggcaccgagtcggtgcaacaccccttgggcgtggcagtcacttgagcaggggtgt

SEQ ID NO: 4649 - RNA, 136 nt, synthetic construct
  source 1..136: mol_type = other RNA
gtttggtgactgccacgcccagttttagagctagaaatagcaagttaaaataaggctagtccgttatcaacttgaaaaagtggcaccgagtcggtgcaacaccccttgggcgtggcagtcacttagataaggggtg

SEQ ID NO: 4650 - RNA, 136 nt, synthetic construct
  source 1..136: mol_type = other RNA
gtttggtgactgccacgcccagttttagagctagaaatagcaagttaaaataaggctagtccgttatcaacttgaaaaagtggcaccgagtcggtgcaacaccccttgggcgtggcagtcacttaggtaaggggtg

SEQ ID NO: 4651 - RNA, 136 nt, synthetic construct
  source 1..136: mol_type = other RNA
gtttggtgactgccacgcccagttttagagctagaaatagcaagttaaaataaggctagtccgttatcaacttgaaaaagtggcaccgagtcggtgcaacaccccttgggcgtggcagtcacagaattcaaggggt

SEQ ID NO: 4652 - RNA, 136 nt, synthetic construct
  source 1..136: mol_type = other RNA
gtttggtgactgccacgcccagttttagagctagaaatagcaagttaaaataaggctagtccgttatcaacttgaaaaagtggcaccgagtcggtgcaacaccccttgggcgtggcagtcactgaattcaaggggt

SEQ ID NO: 4653 - RNA, 136 nt, synthetic construct
  source 1..136: mol_type = other RNA
gtttggtgactgccacgcccagttttagagctagaaatagcaagttaaaataaggctagtccgttatcaacttgaaaaagtggcaccgagtcggtgcaacaccccttgggcgtggcagtcactcttctccaagggg

SEQ ID NO: 4654 - RNA, 136 nt, synthetic construct
  source 1..136: mol_type = other RNA
gtttggtgactgccacgcccagttttagagctagaaatagcaagttaaaataaggctagtccgttatcaacttgaaaaagtggcaccgagtcggtgcaacaccccttgggcgtggcagtcacagatctccaagggg

SEQ ID NO: 4655 - RNA, 136 nt, synthetic construct
  source 1..136: mol_type = other RNA
gtttggtgactgccacgcccagttttagagctagaaatagcaagttaaaataaggctagtccgttatcaacttgaaaaagtggcaccgagtcggtgcaacaccccttgggcgtggcagtcacagatcccccaaggg

SEQ ID NO: 4656 - RNA, 136 nt, synthetic construct
  source 1..136: mol_type = other RNA
gtttggtgactgccacgcccagttttagagctagaaatagcaagttaaaataaggctagtccgttatcaacttgaaaaagtggcaccgagtcggtgcaacaccccttgggcgtggcagtcactcttatcccaaggg

SEQ ID NO: 4657 - RNA, 136 nt, synthetic construct
  source 1..136: mol_type = other RNA
gtttggtgactgccacgcccagttttagagctagaaatagcaagttaaaataaggctagtccgttatcaacttgaaaaagtggcaccgagtcggtgcaacaccccttgggcgtggcagtcactcgagtgcccaagg

SEQ ID NO: 4658 - RNA, 136 nt, synthetic construct
  source 1..136: mol_type = other RNA
gtttggtgactgccacgcccagttttagagctagaaatagcaagttaaaataaggctagtccgttatcaacttgaaaaagtggcaccgagtcggtgcaacaccccttgggcgtggcagtcacggagttgcccaagg

SEQ ID NO: 4659 - RNA, 136 nt, synthetic construct
  source 1..136: mol_type = other RNA
gtttggtgactgccacgcccagttttagagctagaaatagcaagttaaaataaggctagtccgttatcaacttgaaaaagtggcaccgagtcggtgcaacaccccttgggcgtggcagtcacataatccgcccaag

SEQ ID NO: 4660 - RNA, 136 nt, synthetic construct
  source 1..136: mol_type = other RNA
gtttggtgactgccacgcccagttttagagctagaaatagcaagttaaaataaggctagtccgttatcaacttgaaaaagtggcaccgagtcggtgcaacaccccttgggcgtggcagtcacagaatccgcccaag

SEQ ID NO: 4661 - RNA, 134 nt, synthetic construct
  source 1..134: mol_type = other RNA
gtttggtgactgccacgcccagttttagagctagaaatagcaagttaaaataaggctagtccgttatcaacttgaaaaagtggcaccgagtcggtgcaacaccccttgggcgtggcagtcacattgacgcccaa

SEQ ID NO: 4662 - RNA, 136 nt, synthetic construct
  source 1..136: mol_type = other RNA
gtttggtgactgccacgcccagttttagagctagaaatagcaagttaaaataaggctagtccgttatcaacttgaaaaagtggcaccgagtcggtgcaacaccccttgggcgtggcagtcacagaattacgcccaa

SEQ ID NO: 4663 - RNA, 136 nt, synthetic construct
  source 1..136: mol_type = other RNA
gtttggtgactgccacgcccagttttagagctagaaatagcaagttaaaataaggctagtccgttatcaacttgaaaaagtggcaccgagtcggtgcaacaccccttgggcgtggcagtcactccaatcacgccca

SEQ ID NO: 4664 - RNA, 136 nt, synthetic construct
  source 1..136: mol_type = other RNA
gtttggtgactgccacgcccagttttagagctagaaatagcaagttaaaataaggctagtccgttatcaacttgaaaaagtggcaccgagtcggtgcaacaccccttgggcgtggcagtcacattcatcacgccca

SEQ ID NO: 4665 - RNA, 136 nt, synthetic construct
  source 1..136: mol_type = other RNA
gtttggtgactgccacgcccagttttagagctagaaatagcaagttaaaataaggctagtccgttatcaacttgaaaaagtggcaccgagtcggtgcaacaccccttgggcgtggcagtcacgtagttccacgccc

SEQ ID NO: 4666 - RNA, 136 nt, synthetic construct
  source 1..136: mol_type = other RNA
gtttggtgactgccacgcccagttttagagctagaaatagcaagttaaaataaggctagtccgttatcaacttgaaaaagtggcaccgagtcggtgcaacaccccttgggcgtggcagtcacttagttccacgccc

SEQ ID NO: 4667 - RNA, 136 nt, synthetic construct
  source 1..136: mol_type = other RNA
gtttggtgactgccacgcccagttttagagctagaaatagcaagttaaaataaggctagtccgttatcaacttgaaaaagtggcaccgagtcggtgcaacaccccttgggcgtggcagtcacttatgggccacgcc

SEQ ID NO: 4668 - RNA, 136 nt, synthetic construct
  source 1..136: mol_type = other RNA
gtttggtgactgccacgcccagttttagagctagaaatagcaagttaaaataaggctagtccgttatcaacttgaaaaagtggcaccgagtcggtgcaacaccccttgggcgtggcagtcacgtatgggccacgcc

SEQ ID NO: 4669 - RNA, 136 nt, synthetic construct
  source 1..136: mol_type = other RNA
gtttggtgactgccacgcccagttttagagctagaaatagcaagttaaaataaggctagtccgttatcaacttgaaaaagtggcaccgagtcggtgcaacaccccttgggcgtggcagtcacttcccttgccacgc

SEQ ID NO: 4670 - RNA, 136 nt, synthetic construct
  source 1..136: mol_type = other RNA
gtttggtgactgccacgcccagttttagagctagaaatagcaagttaaaataaggctagtccgttatcaacttgaaaaagtggcaccgagtcggtgcaacaccccttgggcgtggcagtcacgtatcttgccacgc

SEQ ID NO: 4671 - RNA, 135 nt, synthetic construct
  source 1..135: mol_type = other RNA
gtttggtgactgccacgcccagttttagagctagaaatagcaagttaaaataaggctagtccgttatcaacttgaaaaagtggcaccgagtcggtgcaacaccccttgggcgtggcagtcactgctactgccacg

SEQ ID NO: 4672 - RNA, 135 nt, synthetic construct
  source 1..135: mol_type = other RNA
gtttggtgactgccacgcccagttttagagctagaaatagcaagttaaaataaggctagtccgttatcaacttgaaaaagtggcaccgagtcggtgcaacaccccttgggcgtggcagtcacagctactgccacg

SEQ ID NO: 4673 - RNA, 136 nt, synthetic construct
  source 1..136: mol_type = other RNA
gtttggtgactgccacgcccagttttagagctagaaatagcaagttaaaataaggctagtccgttatcaacttgaaaaagtggcaccgagtcggtgcaacaccccttgggcgtggcagtcacagtgatactgccac

SEQ ID NO: 4674 - RNA, 136 nt, synthetic construct
  source 1..136: mol_type = other RNA
gtttggtgactgccacgcccagttttagagctagaaatagcaagttaaaataaggctagtccgttatcaacttgaaaaagtggcaccgagtcggtgcaacaccccttgggcgtggcagtcacagtgctactgccac

SEQ ID NO: 4675 - RNA, 136 nt, synthetic construct
  source 1..136: mol_type = other RNA
gtttggtgactgccacgcccagttttagagctagaaatagcaagttaaaataaggctagtccgttatcaacttgaaaaagtggcaccgagtcggtgcaacaccccttgggcgtggcagtcacgtagtctgactgcc

SEQ ID NO: 4676 - RNA, 136 nt, synthetic construct
  source 1..136: mol_type = other RNA
gtttggtgactgccacgcccagttttagagctagaaatagcaagttaaaataaggctagtccgttatcaacttgaaaaagtggcaccgagtcggtgcaacaccccttgggcgtggcagtcacgtgctctgactgcc

SEQ ID NO: 4677 - RNA, 135 nt, synthetic construct
  source 1..135: mol_type = other RNA
gtttggtgactgccacgcccagttttagagctagaaatagcaagttaaaataaggctagtccgttatcaacttgaaaaagtggcaccgagtcggtgcaacaccccttgggcgtggcagtcacagtatgtgactgc

SEQ ID NO: 4678 - RNA, 135 nt, synthetic construct
  source 1..135: mol_type = other RNA
gtttggtgactgccacgcccagttttagagctagaaatagcaagttaaaataaggctagtccgttatcaacttgaaaaagtggcaccgagtcggtgcaacaccccttgggcgtggcagtcactgcaagtgactgc

SEQ ID NO: 4679 - RNA, 124 nt, synthetic construct
  source 1..124: mol_type = other RNA
gttgccaagtgttccagccacgttttagagctagaaatagcaagttaaaataaggctagtccgttatcaacttgaaaaagtggcaccgagtcggtgcttgccctgggccggtggctggaacact

SEQ ID NO: 4680 - RNA, 133 nt, synthetic construct
  source 1..133: mol_type = other RNA
gttgccaagtgttccagccacgttttagagctagaaatagcaagttaaaataaggctagtccgttatcaacttgaaaaagtggcaccgagtcggtgcttgccctgggccggtggctggaacacttaactgcaa

SEQ ID NO: 4681 - RNA, 133 nt, synthetic construct
  source 1..133: mol_type = other RNA
gttgccaagtgttccagccacgttttagagctagaaatagcaagttaaaataaggctagtccgttatcaacttgaaaaagtggcaccgagtcggtgcttgccctgggccggtggctggaacactaaactgcaa

SEQ ID NO: 4682 - RNA, 134 nt, synthetic construct
  source 1..134: mol_type = other RNA
gttgccaagtgttccagccacgttttagagctagaaatagcaagttaaaataaggctagtccgttatcaacttgaaaaagtggcaccgagtcggtgcttgccctgggccggtggctggaacacttatataggca

SEQ ID NO: 4683 - RNA, 134 nt, synthetic construct
  source 1..134: mol_type = other RNA
gttgccaagtgttccagccacgttttagagctagaaatagcaagttaaaataaggctagtccgttatcaacttgaaaaagtggcaccgagtcggtgcttgccctgggccggtggctggaacactataataggca

SEQ ID NO: 4684 - RNA, 133 nt, synthetic construct
  source 1..133: mol_type = other RNA
gttgccaagtgttccagccacgttttagagctagaaatagcaagttaaaataaggctagtccgttatcaacttgaaaaagtggcaccgagtcggtgcttgccctgggccggtggctggaacactaattcgggc

SEQ ID NO: 4685 - RNA, 134 nt, synthetic construct
  source 1..134: mol_type = other RNA
gttgccaagtgttccagccacgttttagagctagaaatagcaagttaaaataaggctagtccgttatcaacttgaaaaagtggcaccgagtcggtgcttgccctgggccggtggctggaacactacgaacgggc

SEQ ID NO: 4686 - RNA, 134 nt, synthetic construct
  source 1..134: mol_type = other RNA
gttgccaagtgttccagccacgttttagagctagaaatagcaagttaaaataaggctagtccgttatcaacttgaaaaagtggcaccgagtcggtgcttgccctgggccggtggctggaacactacaaggaggg

SEQ ID NO: 4687 - RNA, 134 nt, synthetic construct
  source 1..134: mol_type = other RNA
gttgccaagtgttccagccacgttttagagctagaaatagcaagttaaaataaggctagtccgttatcaacttgaaaaagtggcaccgagtcggtgcttgccctgggccggtggctggaacactacgaggaggg

SEQ ID NO: 4688 - RNA, 129 nt, synthetic construct
  source 1..129: mol_type = other RNA
gttgccaagtgttccagccacgttttagagctagaaatagcaagttaaaataaggctagtccgttatcaacttgaaaaagtggcaccgagtcggtgcttgccctgggccggtggctggaacacttcagg

SEQ ID NO: 4689 - RNA, 134 nt, synthetic construct
  source 1..134: mol_type = other RNA
gttgccaagtgttccagccacgttttagagctagaaatagcaagttaaaataaggctagtccgttatcaacttgaaaaagtggcaccgagtcggtgcttgccctgggccggtggctggaacactaatattcagg

SEQ ID NO: 4690 - RNA, 134 nt, synthetic construct
  source 1..134: mol_type = other RNA
gttgccaagtgttccagccacgttttagagctagaaatagcaagttaaaataaggctagtccgttatcaacttgaaaaagtggcaccgagtcggtgcttgccctgggccggtggctggaacacttaccatccag

SEQ ID NO: 4691 - RNA, 134 nt, synthetic construct
  source 1..134: mol_type = other RNA
gttgccaagtgttccagccacgttttagagctagaaatagcaagttaaaataaggctagtccgttatcaacttgaaaaagtggcaccgagtcggtgcttgccctgggccggtggctggaacactccgaatccag

SEQ ID NO: 4692 - RNA, 134 nt, synthetic construct
  source 1..134: mol_type = other RNA
gttgccaagtgttccagccacgttttagagctagaaatagcaagttaaaataaggctagtccgttatcaacttgaaaaagtggcaccgagtcggtgcttgccctgggccggtggctggaacacttatactccca

SEQ ID NO: 4693 - RNA, 134 nt, synthetic construct
  source 1..134: mol_type = other RNA
gttgccaagtgttccagccacgttttagagctagaaatagcaagttaaaataaggctagtccgttatcaacttgaaaaagtggcaccgagtcggtgcttgccctgggccggtggctggaacactattatcccca

SEQ ID NO: 4694 - RNA, 134 nt, synthetic construct
  source 1..134: mol_type = other RNA
gttgccaagtgttccagccacgttttagagctagaaatagcaagttaaaataaggctagtccgttatcaacttgaaaaagtggcaccgagtcggtgcttgccctgggccggtggctggaacacttcttacgccc

SEQ ID NO: 4695 - RNA, 134 nt, synthetic construct
  source 1..134: mol_type = other RNA
gttgccaagtgttccagccacgttttagagctagaaatagcaagttaaaataaggctagtccgttatcaacttgaaaaagtggcaccgagtcggtgcttgccctgggccggtggctggaacactaaaatcgccc

SEQ ID NO: 4696 - RNA, 134 nt, synthetic construct
  source 1..134: mol_type = other RNA
gttgccaagtgttccagccacgttttagagctagaaatagcaagttaaaataaggctagtccgttatcaacttgaaaaagtggcaccgagtcggtgcttgccctgggccggtggctggaacactcttgttggcc

SEQ ID NO: 4697 - RNA, 134 nt, synthetic construct
  source 1..134: mol_type = other RNA
gttgccaagtgttccagccacgttttagagctagaaatagcaagttaaaataaggctagtccgttatcaacttgaaaaagtggcaccgagtcggtgcttgccctgggccggtggctggaacactgacaatggcc

SEQ ID NO: 4698 - RNA, 134 nt, synthetic construct
  source 1..134: mol_type = other RNA
gttgccaagtgttccagccacgttttagagctagaaatagcaagttaaaataaggctagtccgttatcaacttgaaaaagtggcaccgagtcggtgcttgccctgggccggtggctggaacactcaaagtcggc

SEQ ID NO: 4699 - RNA, 134 nt, synthetic construct
  source 1..134: mol_type = other RNA
gttgccaagtgttccagccacgttttagagctagaaatagcaagttaaaataaggctagtccgttatcaacttgaaaaagtggcaccgagtcggtgcttgccctgggccggtggctggaacactcattgtcggc

SEQ ID NO: 4700 - RNA, 134 nt, synthetic construct
  source 1..134: mol_type = other RNA
gttgccaagtgttccagccacgttttagagctagaaatagcaagttaaaataaggctagtccgttatcaacttgaaaaagtggcaccgagtcggtgcttgccctgggccggtggctggaacacttacactccgg

SEQ ID NO: 4701 - RNA, 131 nt, synthetic construct
  source 1..131: mol_type = other RNA
gttgccaagtgttccagccacgttttagagctagaaatagcaagttaaaataaggctagtccgttatcaacttgaaaaagtggcaccgagtcggtgcttgccctgggccggtggctggaacactactccgg

SEQ ID NO: 4702 - RNA, 134 nt, synthetic construct
  source 1..134: mol_type = other RNA
gttgccaagtgttccagccacgttttagagctagaaatagcaagttaaaataaggctagtccgttatcaacttgaaaaagtggcaccgagtcggtgcttgccctgggccggtggctggaacactatcaagaccg

SEQ ID NO: 4703 - RNA, 134 nt, synthetic construct
  source 1..134: mol_type = other RNA
gttgccaagtgttccagccacgttttagagctagaaatagcaagttaaaataaggctagtccgttatcaacttgaaaaagtggcaccgagtcggtgcttgccctgggccggtggctggaacacttattcaaccg

SEQ ID NO: 4704 - RNA, 134 nt, synthetic construct
  source 1..134: mol_type = other RNA
gttgccaagtgttccagccacgttttagagctagaaatagcaagttaaaataaggctagtccgttatcaacttgaaaaagtggcaccgagtcggtgcttgccctgggccggtggctggaacacttaatatcacc

SEQ ID NO: 4705 - RNA, 134 nt, synthetic construct
  source 1..134: mol_type = other RNA
gttgccaagtgttccagccacgttttagagctagaaatagcaagttaaaataaggctagtccgttatcaacttgaaaaagtggcaccgagtcggtgcttgccctgggccggtggctggaacacttaaaatcacc

SEQ ID NO: 4706 - RNA, 133 nt, synthetic construct
  source 1..133: mol_type = other RNA
gttgccaagtgttccagccacgttttagagctagaaatagcaagttaaaataaggctagtccgttatcaacttgaaaaagtggcaccgagtcggtgcttgccctgggccggtggctggaacactattgaccac

SEQ ID NO: 4707 - RNA, 134 nt, synthetic construct
  source 1..134: mol_type = other RNA
gttgccaagtgttccagccacgttttagagctagaaatagcaagttaaaataaggctagtccgttatcaacttgaaaaagtggcaccgagtcggtgcttgccctgggccggtggctggaacactatgtacccac

SEQ ID NO: 4708 - RNA, 134 nt, synthetic construct
  source 1..134: mol_type = other RNA
gttgccaagtgttccagccacgttttagagctagaaatagcaagttaaaataaggctagtccgttatcaacttgaaaaagtggcaccgagtcggtgcttgccctgggccggtggctggaacactatgatcgcca

SEQ ID NO: 4709 - RNA, 134 nt, synthetic construct
  source 1..134: mol_type = other RNA
gttgccaagtgttccagccacgttttagagctagaaatagcaagttaaaataaggctagtccgttatcaacttgaaaaagtggcaccgagtcggtgcttgccctgggccggtggctggaacactatgtacgcca

SEQ ID NO: 4710 - RNA, 134 nt, synthetic construct
  source 1..134: mol_type = other RNA
gttgccaagtgttccagccacgttttagagctagaaatagcaagttaaaataaggctagtccgttatcaacttgaaaaagtggcaccgagtcggtgcttgccctgggccggtggctggaacactcttattagcc

SEQ ID NO: 4711 - RNA, 134 nt, synthetic construct
  source 1..134: mol_type = other RNA
gttgccaagtgttccagccacgttttagagctagaaatagcaagttaaaataaggctagtccgttatcaacttgaaaaagtggcaccgagtcggtgcttgccctgggccggtggctggaacacttatattagcc

SEQ ID NO: 4712 - RNA, 134 nt, synthetic construct
  source 1..134: mol_type = other RNA
gttgccaagtgttccagccacgttttagagctagaaatagcaagttaaaataaggctagtccgttatcaacttgaaaaagtggcaccgagtcggtgcttgccctgggccggtggctggaacactatgaatcagc

SEQ ID NO: 4713 - RNA, 134 nt, synthetic construct
  source 1..134: mol_type = other RNA
gttgccaagtgttccagccacgttttagagctagaaatagcaagttaaaataaggctagtccgttatcaacttgaaaaagtggcaccgagtcggtgcttgccctgggccggtggctggaacactctgaatcagc

SEQ ID NO: 4714 - RNA, 134 nt, synthetic construct
  source 1..134: mol_type = other RNA
gttgccaagtgttccagccacgttttagagctagaaatagcaagttaaaataaggctagtccgttatcaacttgaaaaagtggcaccgagtcggtgcttgccctgggccggtggctggaacacttcattgccag

SEQ ID NO: 4715 - RNA, 134 nt, synthetic construct
  source 1..134: mol_type = other RNA
gttgccaagtgttccagccacgttttagagctagaaatagcaagttaaaataaggctagtccgttatcaacttgaaaaagtggcaccgagtcggtgcttgccctgggccggtggctggaacacttcaatgccag

SEQ ID NO: 4716 - RNA, 134 nt, synthetic construct
  source 1..134: mol_type = other RNA
gttgccaagtgttccagccacgttttagagctagaaatagcaagttaaaataaggctagtccgttatcaacttgaaaaagtggcaccgagtcggtgcttgccctgggccggtggctggaacactcagacgtcca

SEQ ID NO: 4717 - RNA, 134 nt, synthetic construct
  source 1..134: mol_type = other RNA
gttgccaagtgttccagccacgttttagagctagaaatagcaagttaaaataaggctagtccgttatcaacttgaaaaagtggcaccgagtcggtgcttgccctgggccggtggctggaacactaaaaagtcca

SEQ ID NO: 4718 - RNA, 129 nt, synthetic construct
  source 1..129: mol_type = other RNA
gttgccaagtgttccagccacgttttagagctagaaatagcaagttaaaataaggctagtccgttatcaacttgaaaaagtggcaccgagtcggtgcttgccctgggccggtggctggaacactgttcc

SEQ ID NO: 4719 - RNA, 133 nt, synthetic construct
  source 1..133: mol_type = other RNA
gttgccaagtgttccagccacgttttagagctagaaatagcaagttaaaataaggctagtccgttatcaacttgaaaaagtggcaccgagtcggtgcttgccctgggccggtggctggaacacttcaggttcc

SEQ ID NO: 4720 - RNA, 134 nt, synthetic construct
  source 1..134: mol_type = other RNA
gttgccaagtgttccagccacgttttagagctagaaatagcaagttaaaataaggctagtccgttatcaacttgaaaaagtggcaccgagtcggtgcttgccctgggccggtggctggaacactaatgcggttc

SEQ ID NO: 4721 - RNA, 134 nt, synthetic construct
  source 1..134: mol_type = other RNA
gttgccaagtgttccagccacgttttagagctagaaatagcaagttaaaataaggctagtccgttatcaacttgaaaaagtggcaccgagtcggtgcttgccctgggccggtggctggaacacttatgcggttc

SEQ ID NO: 4722 - RNA, 131 nt, synthetic construct
  source 1..131: mol_type = other RNA
gttgccaagtgttccagccacgttttagagctagaaatagcaagttaaaataaggctagtccgttatcaacttgaaaaagtggcaccgagtcggtgcttgccctgggccggtggctggaacactacgtgtt

SEQ ID NO: 4723 - RNA, 131 nt, synthetic construct
  source 1..131: mol_type = other RNA
gttgccaagtgttccagccacgttttagagctagaaatagcaagttaaaataaggctagtccgttatcaacttgaaaaagtggcaccgagtcggtgcttgccctgggccggtggctggaacactaagtgtt

SEQ ID NO: 4724 - RNA, 132 nt, synthetic construct
  source 1..132: mol_type = other RNA
gttgccaagtgttccagccacgttttagagctagaaatagcaagttaaaataaggctagtccgttatcaacttgaaaaagtggcaccgagtcggtgcttgccctgggccggtggctggaacactgctagtgt

SEQ ID NO: 4725 - RNA, 132 nt, synthetic construct
  source 1..132: mol_type = other RNA
gttgccaagtgttccagccacgttttagagctagaaatagcaagttaaaataaggctagtccgttatcaacttgaaaaagtggcaccgagtcggtgcttgccctgggccggtggctggaacacttccagtgt

SEQ ID NO: 4726 - RNA, 133 nt, synthetic construct
  source 1..133: mol_type = other RNA
gttgccaagtgttccagccacgttttagagctagaaatagcaagttaaaataaggctagtccgttatcaacttgaaaaagtggcaccgagtcggtgcttgccctgggccggtggctggaacacttcaaaagtg

SEQ ID NO: 4727 - RNA, 133 nt, synthetic construct
  source 1..133: mol_type = other RNA
gttgccaagtgttccagccacgttttagagctagaaatagcaagttaaaataaggctagtccgttatcaacttgaaaaagtggcaccgagtcggtgcttgccctgggccggtggctggaacacttattaagtg

SEQ ID NO: 4728 - RNA, 135 nt, synthetic construct
  source 1..135: mol_type = other RNA
gttgccaagtgttccagccacgttttagagctagaaatagcaagttaaaataaggctagtccgttatcaacttgaaaaagtggcaccgagtcggtgcttgccctgggccggtggctggaacacttcagcgggcaa

SEQ ID NO: 4729 - RNA, 136 nt, synthetic construct
  source 1..136: mol_type = other RNA
gttgccaagtgttccagccacgttttagagctagaaatagcaagttaaaataaggctagtccgttatcaacttgaaaaagtggcaccgagtcggtgcttgccctgggccggtggctggaacactacgaacgggcaa

SEQ ID NO: 4730 - RNA, 136 nt, synthetic construct
  source 1..136: mol_type = other RNA
gttgccaagtgttccagccacgttttagagctagaaatagcaagttaaaataaggctagtccgttatcaacttgaaaaagtggcaccgagtcggtgcttgccctgggccggtggctggaacactacaaggagggca

SEQ ID NO: 4731 - RNA, 136 nt, synthetic construct
  source 1..136: mol_type = other RNA
gttgccaagtgttccagccacgttttagagctagaaatagcaagttaaaataaggctagtccgttatcaacttgaaaaagtggcaccgagtcggtgcttgccctgggccggtggctggaacactacgaggagggca

SEQ ID NO: 4732 - RNA, 131 nt, synthetic construct
  source 1..131: mol_type = other RNA
gttgccaagtgttccagccacgttttagagctagaaatagcaagttaaaataaggctagtccgttatcaacttgaaaaagtggcaccgagtcggtgcttgccctgggccggtggctggaacacttcagggc

SEQ ID NO: 4733 - RNA, 136 nt, synthetic construct
  source 1..136: mol_type = other RNA
gttgccaagtgttccagccacgttttagagctagaaatagcaagttaaaataaggctagtccgttatcaacttgaaaaagtggcaccgagtcggtgcttgccctgggccggtggctggaacactaatattcagggc

SEQ ID NO: 4734 - RNA, 136 nt, synthetic construct
  source 1..136: mol_type = other RNA
gttgccaagtgttccagccacgttttagagctagaaatagcaagttaaaataaggctagtccgttatcaacttgaaaaagtggcaccgagtcggtgcttgccctgggccggtggctggaacacttacttgccaggg

SEQ ID NO: 4735 - RNA, 136 nt, synthetic construct
  source 1..136: mol_type = other RNA
gttgccaagtgttccagccacgttttagagctagaaatagcaagttaaaataaggctagtccgttatcaacttgaaaaagtggcaccgagtcggtgcttgccctgggccggtggctggaacacttactagccaggg

SEQ ID NO: 4736 - RNA, 136 nt, synthetic construct
  source 1..136: mol_type = other RNA
gttgccaagtgttccagccacgttttagagctagaaatagcaagttaaaataaggctagtccgttatcaacttgaaaaagtggcaccgagtcggtgcttgccctgggccggtggctggaacactctcattcccagg

SEQ ID NO: 4737 - RNA, 136 nt, synthetic construct
  source 1..136: mol_type = other RNA
gttgccaagtgttccagccacgttttagagctagaaatagcaagttaaaataaggctagtccgttatcaacttgaaaaagtggcaccgagtcggtgcttgccctgggccggtggctggaacacttaacaccccagg

SEQ ID NO: 4738 - RNA, 136 nt, synthetic construct
  source 1..136: mol_type = other RNA
gttgccaagtgttccagccacgttttagagctagaaatagcaagttaaaataaggctagtccgttatcaacttgaaaaagtggcaccgagtcggtgcttgccctgggccggtggctggaacacttctaacgcccag

SEQ ID NO: 4739 - RNA, 136 nt, synthetic construct
  source 1..136: mol_type = other RNA
gttgccaagtgttccagccacgttttagagctagaaatagcaagttaaaataaggctagtccgttatcaacttgaaaaagtggcaccgagtcggtgcttgccctgggccggtggctggaacacttcttacgcccag

SEQ ID NO: 4740 - RNA, 136 nt, synthetic construct
  source 1..136: mol_type = other RNA
gttgccaagtgttccagccacgttttagagctagaaatagcaagttaaaataaggctagtccgttatcaacttgaaaaagtggcaccgagtcggtgcttgccctgggccggtggctggaacactgttcatggccca

SEQ ID NO: 4741 - RNA, 136 nt, synthetic construct
  source 1..136: mol_type = other RNA
gttgccaagtgttccagccacgttttagagctagaaatagcaagttaaaataaggctagtccgttatcaacttgaaaaagtggcaccgagtcggtgcttgccctgggccggtggctggaacactgaacatggccca

SEQ ID NO: 4742 - RNA, 136 nt, synthetic construct
  source 1..136: mol_type = other RNA
gttgccaagtgttccagccacgttttagagctagaaatagcaagttaaaataaggctagtccgttatcaacttgaaaaagtggcaccgagtcggtgcttgccctgggccggtggctggaacactgatggtcggccc

SEQ ID NO: 4743 - RNA, 136 nt, synthetic construct
  source 1..136: mol_type = other RNA
gttgccaagtgttccagccacgttttagagctagaaatagcaagttaaaataaggctagtccgttatcaacttgaaaaagtggcaccgagtcggtgcttgccctgggccggtggctggaacactcaaagtcggccc

SEQ ID NO: 4744 - RNA, 136 nt, synthetic construct
  source 1..136: mol_type = other RNA
gttgccaagtgttccagccacgttttagagctagaaatagcaagttaaaataaggctagtccgttatcaacttgaaaaagtggcaccgagtcggtgcttgccctgggccggtggctggaacactgaaatcccggcc

SEQ ID NO: 4745 - RNA, 136 nt, synthetic construct
  source 1..136: mol_type = other RNA
gttgccaagtgttccagccacgttttagagctagaaatagcaagttaaaataaggctagtccgttatcaacttgaaaaagtggcaccgagtcggtgcttgccctgggccggtggctggaacacttaaatcccggcc

SEQ ID NO: 4746 - RNA, 136 nt, synthetic construct
  source 1..136: mol_type = other RNA
gttgccaagtgttccagccacgttttagagctagaaatagcaagttaaaataaggctagtccgttatcaacttgaaaaagtggcaccgagtcggtgcttgccctgggccggtggctggaacactgtaacaaccggc

SEQ ID NO: 4747 - RNA, 136 nt, synthetic construct
  source 1..136: mol_type = other RNA
gttgccaagtgttccagccacgttttagagctagaaatagcaagttaaaataaggctagtccgttatcaacttgaaaaagtggcaccgagtcggtgcttgccctgggccggtggctggaacactgattagaccggc

SEQ ID NO: 4748 - RNA, 136 nt, synthetic construct
  source 1..136: mol_type = other RNA
gttgccaagtgttccagccacgttttagagctagaaatagcaagttaaaataaggctagtccgttatcaacttgaaaaagtggcaccgagtcggtgcttgccctgggccggtggctggaacactgaaaatcaccgg

SEQ ID NO: 4749 - RNA, 136 nt, synthetic construct
  source 1..136: mol_type = other RNA
gttgccaagtgttccagccacgttttagagctagaaatagcaagttaaaataaggctagtccgttatcaacttgaaaaagtggcaccgagtcggtgcttgccctgggccggtggctggaacacttaaaatcaccgg

SEQ ID NO: 4750 - RNA, 135 nt, synthetic construct
  source 1..135: mol_type = other RNA
gttgccaagtgttccagccacgttttagagctagaaatagcaagttaaaataaggctagtccgttatcaacttgaaaaagtggcaccgagtcggtgcttgccctgggccggtggctggaacacttaatcccaccg

SEQ ID NO: 4751 - RNA, 136 nt, synthetic construct
  source 1..136: mol_type = other RNA
gttgccaagtgttccagccacgttttagagctagaaatagcaagttaaaataaggctagtccgttatcaacttgaaaaagtggcaccgagtcggtgcttgccctgggccggtggctggaacacttatgtcccaccg

SEQ ID NO: 4752 - RNA, 136 nt, synthetic construct
  source 1..136: mol_type = other RNA
gttgccaagtgttccagccacgttttagagctagaaatagcaagttaaaataaggctagtccgttatcaacttgaaaaagtggcaccgagtcggtgcttgccctgggccggtggctggaacactaatgtcgccacc

SEQ ID NO: 4753 - RNA, 136 nt, synthetic construct
  source 1..136: mol_type = other RNA
gttgccaagtgttccagccacgttttagagctagaaatagcaagttaaaataaggctagtccgttatcaacttgaaaaagtggcaccgagtcggtgcttgccctgggccggtggctggaacactatggtcgccacc

SEQ ID NO: 4754 - RNA, 136 nt, synthetic construct
  source 1..136: mol_type = other RNA
gttgccaagtgttccagccacgttttagagctagaaatagcaagttaaaataaggctagtccgttatcaacttgaaaaagtggcaccgagtcggtgcttgccctgggccggtggctggaacactcatattagccac

SEQ ID NO: 4755 - RNA, 136 nt, synthetic construct
  source 1..136: mol_type = other RNA
gttgccaagtgttccagccacgttttagagctagaaatagcaagttaaaataaggctagtccgttatcaacttgaaaaagtggcaccgagtcggtgcttgccctgggccggtggctggaacacttagattagccac

SEQ ID NO: 4756 - RNA, 136 nt, synthetic construct
  source 1..136: mol_type = other RNA
gttgccaagtgttccagccacgttttagagctagaaatagcaagttaaaataaggctagtccgttatcaacttgaaaaagtggcaccgagtcggtgcttgccctgggccggtggctggaacacttcgcatcagcca

SEQ ID NO: 4757 - RNA, 136 nt, synthetic construct
  source 1..136: mol_type = other RNA
gttgccaagtgttccagccacgttttagagctagaaatagcaagttaaaataaggctagtccgttatcaacttgaaaaagtggcaccgagtcggtgcttgccctgggccggtggctggaacactccgcatcagcca

SEQ ID NO: 4758 - RNA, 136 nt, synthetic construct
  source 1..136: mol_type = other RNA
gttgccaagtgttccagccacgttttagagctagaaatagcaagttaaaataaggctagtccgttatcaacttgaaaaagtggcaccgagtcggtgcttgccctgggccggtggctggaacactcagaatccagcc

SEQ ID NO: 4759 - RNA, 136 nt, synthetic construct
  source 1..136: mol_type = other RNA
gttgccaagtgttccagccacgttttagagctagaaatagcaagttaaaataaggctagtccgttatcaacttgaaaaagtggcaccgagtcggtgcttgccctgggccggtggctggaacactaaatatccagcc

SEQ ID NO: 4760 - RNA, 135 nt, synthetic construct
  source 1..135: mol_type = other RNA
gttgccaagtgttccagccacgttttagagctagaaatagcaagttaaaataaggctagtccgttatcaacttgaaaaagtggcaccgagtcggtgcttgccctgggccggtggctggaacactcaacgtccagc

SEQ ID NO: 4761 - RNA, 135 nt, synthetic construct
  source 1..135: mol_type = other RNA
gttgccaagtgttccagccacgttttagagctagaaatagcaagttaaaataaggctagtccgttatcaacttgaaaaagtggcaccgagtcggtgcttgccctgggccggtggctggaacacttatcgtccagc

SEQ ID NO: 4762 - RNA, 135 nt, synthetic construct
  source 1..135: mol_type = other RNA
gttgccaagtgttccagccacgttttagagctagaaatagcaagttaaaataaggctagtccgttatcaacttgaaaaagtggcaccgagtcggtgcttgccctgggccggtggctggaacactgtcggttccag

SEQ ID NO: 4763 - RNA, 135 nt, synthetic construct
  source 1..135: mol_type = other RNA
gttgccaagtgttccagccacgttttagagctagaaatagcaagttaaaataaggctagtccgttatcaacttgaaaaagtggcaccgagtcggtgcttgccctgggccggtggctggaacacttaaggttccag

SEQ ID NO: 4764 - RNA, 136 nt, synthetic construct
  source 1..136: mol_type = other RNA
gttgccaagtgttccagccacgttttagagctagaaatagcaagttaaaataaggctagtccgttatcaacttgaaaaagtggcaccgagtcggtgcttgccctgggccggtggctggaacacttctacggttcca

SEQ ID NO: 4765 - RNA, 136 nt, synthetic construct
  source 1..136: mol_type = other RNA
gttgccaagtgttccagccacgttttagagctagaaatagcaagttaaaataaggctagtccgttatcaacttgaaaaagtggcaccgagtcggtgcttgccctgggccggtggctggaacactgcaacggttcca

SEQ ID NO: 4766 - RNA, 133 nt, synthetic construct
  source 1..133: mol_type = other RNA
gttgccaagtgttccagccacgttttagagctagaaatagcaagttaaaataaggctagtccgttatcaacttgaaaaagtggcaccgagtcggtgcttgccctgggccggtggctggaacactacgtgttcc

SEQ ID NO: 4767 - RNA, 133 nt, synthetic construct
  source 1..133: mol_type = other RNA
gttgccaagtgttccagccacgttttagagctagaaatagcaagttaaaataaggctagtccgttatcaacttgaaaaagtggcaccgagtcggtgcttgccctgggccggtggctggaacacttagtgttcc

SEQ ID NO: 4768 - RNA, 134 nt, synthetic construct
  source 1..134: mol_type = other RNA
gttgccaagtgttccagccacgttttagagctagaaatagcaagttaaaataaggctagtccgttatcaacttgaaaaagtggcaccgagtcggtgcttgccctgggccggtggctggaacacttccggtgttc

SEQ ID NO: 4769 - RNA, 134 nt, synthetic construct
  source 1..134: mol_type = other RNA
gttgccaagtgttccagccacgttttagagctagaaatagcaagttaaaataaggctagtccgttatcaacttgaaaaagtggcaccgagtcggtgcttgccctgggccggtggctggaacacttctggtgttc

SEQ ID NO: 4770 - RNA, 135 nt, synthetic construct
  source 1..135: mol_type = other RNA
gttgccaagtgttccagccacgttttagagctagaaatagcaagttaaaataaggctagtccgttatcaacttgaaaaagtggcaccgagtcggtgcttgccctgggccggtggctggaacacttcccaagtgtt

SEQ ID NO: 4771 - RNA, 135 nt, synthetic construct
  source 1..135: mol_type = other RNA
gttgccaagtgttccagccacgttttagagctagaaatagcaagttaaaataaggctagtccgttatcaacttgaaaaagtggcaccgagtcggtgcttgccctgggccggtggctggaacacttatcaagtgtt

SEQ ID NO: 4772 - RNA, 133 nt, synthetic construct
  source 1..133: mol_type = other RNA
gttgccaagtgttccagccacgttttagagctagaaatagcaagttaaaataaggctagtccgttatcaacttgaaaaagtggcaccgagtcggtgcttgccctgggccggtggctggaacacttcagggcaa

SEQ ID NO: 4773 - RNA, 138 nt, synthetic construct
  source 1..138: mol_type = other RNA
gttgccaagtgttccagccacgttttagagctagaaatagcaagttaaaataaggctagtccgttatcaacttgaaaaagtggcaccgagtcggtgcttgccctgggccggtggctggaacacttctattcagggcaa

SEQ ID NO: 4774 - RNA, 138 nt, synthetic construct
  source 1..138: mol_type = other RNA
gttgccaagtgttccagccacgttttagagctagaaatagcaagttaaaataaggctagtccgttatcaacttgaaaaagtggcaccgagtcggtgcttgccctgggccggtggctggaacacttactagccagggca

SEQ ID NO: 4775 - RNA, 138 nt, synthetic construct
  source 1..138: mol_type = other RNA
gttgccaagtgttccagccacgttttagagctagaaatagcaagttaaaataaggctagtccgttatcaacttgaaaaagtggcaccgagtcggtgcttgccctgggccggtggctggaacacttacttgccagggca

SEQ ID NO: 4776 - RNA, 138 nt, synthetic construct
  source 1..138: mol_type = other RNA
gttgccaagtgttccagccacgttttagagctagaaatagcaagttaaaataaggctagtccgttatcaacttgaaaaagtggcaccgagtcggtgcttgccctgggccggtggctggaacactctcattcccagggc

SEQ ID NO: 4777 - RNA, 138 nt, synthetic construct
  source 1..138: mol_type = other RNA
gttgccaagtgttccagccacgttttagagctagaaatagcaagttaaaataaggctagtccgttatcaacttgaaaaagtggcaccgagtcggtgcttgccctgggccggtggctggaacactcagaaccccagggc

SEQ ID NO: 4778 - RNA, 138 nt, synthetic construct
  source 1..138: mol_type = other RNA
gttgccaagtgttccagccacgttttagagctagaaatagcaagttaaaataaggctagtccgttatcaacttgaaaaagtggcaccgagtcggtgcttgccctgggccggtggctggaacacttctaacgcccaggg

SEQ ID NO: 4779 - RNA, 138 nt, synthetic construct
  source 1..138: mol_type = other RNA
gttgccaagtgttccagccacgttttagagctagaaatagcaagttaaaataaggctagtccgttatcaacttgaaaaagtggcaccgagtcggtgcttgccctgggccggtggctggaacacttcaatcgcccaggg

SEQ ID NO: 4780 - RNA, 138 nt, synthetic construct
  source 1..138: mol_type = other RNA
gttgccaagtgttccagccacgttttagagctagaaatagcaagttaaaataaggctagtccgttatcaacttgaaaaagtggcaccgagtcggtgcttgccctgggccggtggctggaacactgaacatggcccagg

SEQ ID NO: 4781 - RNA, 138 nt, synthetic construct
  source 1..138: mol_type = other RNA
gttgccaagtgttccagccacgttttagagctagaaatagcaagttaaaataaggctagtccgttatcaacttgaaaaagtggcaccgagtcggtgcttgccctgggccggtggctggaacactgatcatggcccagg

SEQ ID NO: 4782 - RNA, 138 nt, synthetic construct
  source 1..138: mol_type = other RNA
gttgccaagtgttccagccacgttttagagctagaaatagcaagttaaaataaggctagtccgttatcaacttgaaaaagtggcaccgagtcggtgcttgccctgggccggtggctggaacactgatggtcggcccag

SEQ ID NO: 4783 - RNA, 138 nt, synthetic construct
  source 1..138: mol_type = other RNA
gttgccaagtgttccagccacgttttagagctagaaatagcaagttaaaataaggctagtccgttatcaacttgaaaaagtggcaccgagtcggtgcttgccctgggccggtggctggaacactcaaagtcggcccag

SEQ ID NO: 4784 - RNA, 138 nt, synthetic construct
  source 1..138: mol_type = other RNA
gttgccaagtgttccagccacgttttagagctagaaatagcaagttaaaataaggctagtccgttatcaacttgaaaaagtggcaccgagtcggtgcttgccctgggccggtggctggaacactgaatgtccggccca

SEQ ID NO: 4785 - RNA, 138 nt, synthetic construct
  source 1..138: mol_type = other RNA
gttgccaagtgttccagccacgttttagagctagaaatagcaagttaaaataaggctagtccgttatcaacttgaaaaagtggcaccgagtcggtgcttgccctgggccggtggctggaacactgattgtccggccca

SEQ ID NO: 4786 - RNA, 138 nt, synthetic construct
  source 1..138: mol_type = other RNA
gttgccaagtgttccagccacgttttagagctagaaatagcaagttaaaataaggctagtccgttatcaacttgaaaaagtggcaccgagtcggtgcttgccctgggccggtggctggaacactgtactaaccggccc

SEQ ID NO: 4787 - RNA, 138 nt, synthetic construct
  source 1..138: mol_type = other RNA
gttgccaagtgttccagccacgttttagagctagaaatagcaagttaaaataaggctagtccgttatcaacttgaaaaagtggcaccgagtcggtgcttgccctgggccggtggctggaacactgtaacaaccggccc

SEQ ID NO: 4788 - RNA, 138 nt, synthetic construct
  source 1..138: mol_type = other RNA
gttgccaagtgttccagccacgttttagagctagaaatagcaagttaaaataaggctagtccgttatcaacttgaaaaagtggcaccgagtcggtgcttgccctgggccggtggctggaacacttaaaatcaccggcc

SEQ ID NO: 4789 - RNA, 138 nt, synthetic construct
  source 1..138: mol_type = other RNA
gttgccaagtgttccagccacgttttagagctagaaatagcaagttaaaataaggctagtccgttatcaacttgaaaaagtggcaccgagtcggtgcttgccctgggccggtggctggaacactgaaaatcaccggcc

SEQ ID NO: 4790 - RNA, 137 nt, synthetic construct
  source 1..137: mol_type = other RNA
gttgccaagtgttccagccacgttttagagctagaaatagcaagttaaaataaggctagtccgttatcaacttgaaaaagtggcaccgagtcggtgcttgccctgggccggtggctggaacactgtaacccaccggc

SEQ ID NO: 4791 - RNA, 137 nt, synthetic construct
  source 1..137: mol_type = other RNA
gttgccaagtgttccagccacgttttagagctagaaatagcaagttaaaataaggctagtccgttatcaacttgaaaaagtggcaccgagtcggtgcttgccctgggccggtggctggaacacttaatcccaccggc

SEQ ID NO: 4792 - RNA, 138 nt, synthetic construct
  source 1..138: mol_type = other RNA
gttgccaagtgttccagccacgttttagagctagaaatagcaagttaaaataaggctagtccgttatcaacttgaaaaagtggcaccgagtcggtgcttgccctgggccggtggctggaacactcatgtcgccaccgg

SEQ ID NO: 4793 - RNA, 138 nt, synthetic construct
  source 1..138: mol_type = other RNA
gttgccaagtgttccagccacgttttagagctagaaatagcaagttaaaataaggctagtccgttatcaacttgaaaaagtggcaccgagtcggtgcttgccctgggccggtggctggaacactaatgtcgccaccgg

SEQ ID NO: 4794 - RNA, 138 nt, synthetic construct
  source 1..138: mol_type = other RNA
gttgccaagtgttccagccacgttttagagctagaaatagcaagttaaaataaggctagtccgttatcaacttgaaaaagtggcaccgagtcggtgcttgccctgggccggtggctggaacacttacattagccaccg

SEQ ID NO: 4795 - RNA, 138 nt, synthetic construct
  source 1..138: mol_type = other RNA
gttgccaagtgttccagccacgttttagagctagaaatagcaagttaaaataaggctagtccgttatcaacttgaaaaagtggcaccgagtcggtgcttgccctgggccggtggctggaacactgcaattagccaccg

SEQ ID NO: 4796 - RNA, 138 nt, synthetic construct
  source 1..138: mol_type = other RNA
gttgccaagtgttccagccacgttttagagctagaaatagcaagttaaaataaggctagtccgttatcaacttgaaaaagtggcaccgagtcggtgcttgccctgggccggtggctggaacactcagcatcagccacc

SEQ ID NO: 4797 - RNA, 138 nt, synthetic construct
  source 1..138: mol_type = other RNA
gttgccaagtgttccagccacgttttagagctagaaatagcaagttaaaataaggctagtccgttatcaacttgaaaaagtggcaccgagtcggtgcttgccctgggccggtggctggaacactgcgcatcagccacc

SEQ ID NO: 4798 - RNA, 138 nt, synthetic construct
  source 1..138: mol_type = other RNA
gttgccaagtgttccagccacgttttagagctagaaatagcaagttaaaataaggctagtccgttatcaacttgaaaaagtggcaccgagtcggtgcttgccctgggccggtggctggaacactctctatccagccac

SEQ ID NO: 4799 - RNA, 138 nt, synthetic construct
  source 1..138: mol_type = other RNA
gttgccaagtgttccagccacgttttagagctagaaatagcaagttaaaataaggctagtccgttatcaacttgaaaaagtggcaccgagtcggtgcttgccctgggccggtggctggaacactgaacatccagccac

SEQ ID NO: 4800 - RNA, 137 nt, synthetic construct
  source 1..137: mol_type = other RNA
gttgccaagtgttccagccacgttttagagctagaaatagcaagttaaaataaggctagtccgttatcaacttgaaaaagtggcaccgagtcggtgcttgccctgggccggtggctggaacactaccagtccagcca

SEQ ID NO: 4801 - RNA, 137 nt, synthetic construct
  source 1..137: mol_type = other RNA
gttgccaagtgttccagccacgttttagagctagaaatagcaagttaaaataaggctagtccgttatcaacttgaaaaagtggcaccgagtcggtgcttgccctgggccggtggctggaacactcttcgtccagcca

SEQ ID NO: 4802 - RNA, 133 nt, synthetic construct
  source 1..133: mol_type = other RNA
gttgccaagtgttccagccacgttttagagctagaaatagcaagttaaaataaggctagtccgttatcaacttgaaaaagtggcaccgagtcggtgcttgccctgggccggtggctggaacactgttccagcc

SEQ ID NO: 4803 - RNA, 137 nt, synthetic construct
  source 1..137: mol_type = other RNA
gttgccaagtgttccagccacgttttagagctagaaatagcaagttaaaataaggctagtccgttatcaacttgaaaaagtggcaccgagtcggtgcttgccctgggccggtggctggaacactgccggttccagcc

SEQ ID NO: 4804 - RNA, 138 nt, synthetic construct
  source 1..138: mol_type = other RNA
gttgccaagtgttccagccacgttttagagctagaaatagcaagttaaaataaggctagtccgttatcaacttgaaaaagtggcaccgagtcggtgcttgccctgggccggtggctggaacactcatacggttccagc

SEQ ID NO: 4805 - RNA, 138 nt, synthetic construct
  source 1..138: mol_type = other RNA
gttgccaagtgttccagccacgttttagagctagaaatagcaagttaaaataaggctagtccgttatcaacttgaaaaagtggcaccgagtcggtgcttgccctgggccggtggctggaacacttcagcggttccagc

SEQ ID NO: 4806 - RNA, 135 nt, synthetic construct
  source 1..135: mol_type = other RNA
gttgccaagtgttccagccacgttttagagctagaaatagcaagttaaaataaggctagtccgttatcaacttgaaaaagtggcaccgagtcggtgcttgccctgggccggtggctggaacactcagtgttccag

SEQ ID NO: 4807 - RNA, 135 nt, synthetic construct
  source 1..135: mol_type = other RNA
gttgccaagtgttccagccacgttttagagctagaaatagcaagttaaaataaggctagtccgttatcaacttgaaaaagtggcaccgagtcggtgcttgccctgggccggtggctggaacactaagtgttccag

SEQ ID NO: 4808 - RNA, 136 nt, synthetic construct
  source 1..136: mol_type = other RNA
gttgccaagtgttccagccacgttttagagctagaaatagcaagttaaaataaggctagtccgttatcaacttgaaaaagtggcaccgagtcggtgcttgccctgggccggtggctggaacactgctggtgttcca

SEQ ID NO: 4809 - RNA, 136 nt, synthetic construct
  source 1..136: mol_type = other RNA
gttgccaagtgttccagccacgttttagagctagaaatagcaagttaaaataaggctagtccgttatcaacttgaaaaagtggcaccgagtcggtgcttgccctgggccggtggctggaacactgatagtgttcca

SEQ ID NO: 4810 - RNA, 137 nt, synthetic construct
  source 1..137: mol_type = other RNA
gttgccaagtgttccagccacgttttagagctagaaatagcaagttaaaataaggctagtccgttatcaacttgaaaaagtggcaccgagtcggtgcttgccctgggccggtggctggaacacttcagaagtgttcc

SEQ ID NO: 4811 - RNA, 137 nt, synthetic construct
  source 1..137: mol_type = other RNA
gttgccaagtgttccagccacgttttagagctagaaatagcaagttaaaataaggctagtccgttatcaacttgaaaaagtggcaccgagtcggtgcttgccctgggccggtggctggaacacttactaagtgttcc

SEQ ID NO: 4812 - RNA, 123 nt, synthetic construct
  source 1..123: mol_type = other RNA
gttgccaagtgttccagccacgttttagagctagaaatagcaagttaaaataaggctagtccgttatcaacttgaaaaagtggcaccgagtcggtgcgccctgggccggtggctggaacactt

SEQ ID NO: 4813 - RNA, 133 nt, synthetic construct
  source 1..133: mol_type = other RNA
gttgccaagtgttccagccacgttttagagctagaaatagcaagttaaaataaggctagtccgttatcaacttgaaaaagtggcaccgagtcggtgcgccctgggccggtggctggaacacttctgagcgggc

SEQ ID NO: 4814 - RNA, 133 nt, synthetic construct
  source 1..133: mol_type = other RNA
gttgccaagtgttccagccacgttttagagctagaaatagcaagttaaaataaggctagtccgttatcaacttgaaaaagtggcaccgagtcggtgcgccctgggccggtggctggaacacttctgaacgggc

SEQ ID NO: 4815 - RNA, 133 nt, synthetic construct
  source 1..133: mol_type = other RNA
gttgccaagtgttccagccacgttttagagctagaaatagcaagttaaaataaggctagtccgttatcaacttgaaaaagtggcaccgagtcggtgcgccctgggccggtggctggaacacttaaacggaggg

SEQ ID NO: 4816 - RNA, 133 nt, synthetic construct
  source 1..133: mol_type = other RNA
gttgccaagtgttccagccacgttttagagctagaaatagcaagttaaaataaggctagtccgttatcaacttgaaaaagtggcaccgagtcggtgcgccctgggccggtggctggaacacttattcggaggg

SEQ ID NO: 4817 - RNA, 133 nt, synthetic construct
  source 1..133: mol_type = other RNA
gttgccaagtgttccagccacgttttagagctagaaatagcaagttaaaataaggctagtccgttatcaacttgaaaaagtggcaccgagtcggtgcgccctgggccggtggctggaacacttatactgcagg

SEQ ID NO: 4818 - RNA, 133 nt, synthetic construct
  source 1..133: mol_type = other RNA
gttgccaagtgttccagccacgttttagagctagaaatagcaagttaaaataaggctagtccgttatcaacttgaaaaagtggcaccgagtcggtgcgccctgggccggtggctggaacacttaaaattcagg

SEQ ID NO: 4819 - RNA, 133 nt, synthetic construct
  source 1..133: mol_type = other RNA
gttgccaagtgttccagccacgttttagagctagaaatagcaagttaaaataaggctagtccgttatcaacttgaaaaagtggcaccgagtcggtgcgccctgggccggtggctggaacacttacattgccag

SEQ ID NO: 4820 - RNA, 133 nt, synthetic construct
  source 1..133: mol_type = other RNA
gttgccaagtgttccagccacgttttagagctagaaatagcaagttaaaataaggctagtccgttatcaacttgaaaaagtggcaccgagtcggtgcgccctgggccggtggctggaacacttatatcgccag

SEQ ID NO: 4821 - RNA, 133 nt, synthetic construct
  source 1..133: mol_type = other RNA
gttgccaagtgttccagccacgttttagagctagaaatagcaagttaaaataaggctagtccgttatcaacttgaaaaagtggcaccgagtcggtgcgccctgggccggtggctggaacacttattactccca

SEQ ID NO: 4822 - RNA, 133 nt, synthetic construct
  source 1..133: mol_type = other RNA
gttgccaagtgttccagccacgttttagagctagaaatagcaagttaaaataaggctagtccgttatcaacttgaaaaagtggcaccgagtcggtgcgccctgggccggtggctggaacacttcttactccca

SEQ ID NO: 4823 - RNA, 133 nt, synthetic construct
  source 1..133: mol_type = other RNA
gttgccaagtgttccagccacgttttagagctagaaatagcaagttaaaataaggctagtccgttatcaacttgaaaaagtggcaccgagtcggtgcgccctgggccggtggctggaacacttaaaatcgccc

SEQ ID NO: 4824 - RNA, 133 nt, synthetic construct
  source 1..133: mol_type = other RNA
gttgccaagtgttccagccacgttttagagctagaaatagcaagttaaaataaggctagtccgttatcaacttgaaaaagtggcaccgagtcggtgcgccctgggccggtggctggaacacttatgatcgccc

SEQ ID NO: 4825 - RNA, 133 nt, synthetic construct
  source 1..133: mol_type = other RNA
gttgccaagtgttccagccacgttttagagctagaaatagcaagttaaaataaggctagtccgttatcaacttgaaaaagtggcaccgagtcggtgcgccctgggccggtggctggaacacttcatgttggcc

SEQ ID NO: 4826 - RNA, 133 nt, synthetic construct
  source 1..133: mol_type = other RNA
gttgccaagtgttccagccacgttttagagctagaaatagcaagttaaaataaggctagtccgttatcaacttgaaaaagtggcaccgagtcggtgcgccctgggccggtggctggaacacttcattatggcc

SEQ ID NO: 4827 - RNA, 133 nt, synthetic construct
  source 1..133: mol_type = other RNA
gttgccaagtgttccagccacgttttagagctagaaatagcaagttaaaataaggctagtccgttatcaacttgaaaaagtggcaccgagtcggtgcgccctgggccggtggctggaacacttacaagtcggc

SEQ ID NO: 4828 - RNA, 133 nt, synthetic construct
  source 1..133: mol_type = other RNA
gttgccaagtgttccagccacgttttagagctagaaatagcaagttaaaataaggctagtccgttatcaacttgaaaaagtggcaccgagtcggtgcgccctgggccggtggctggaacacttacaattcggc

SEQ ID NO: 4829 - RNA, 133 nt, synthetic construct
  source 1..133: mol_type = other RNA
gttgccaagtgttccagccacgttttagagctagaaatagcaagttaaaataaggctagtccgttatcaacttgaaaaagtggcaccgagtcggtgcgccctgggccggtggctggaacacttacgactccgg

SEQ ID NO: 4830 - RNA, 133 nt, synthetic construct
  source 1..133: mol_type = other RNA
gttgccaagtgttccagccacgttttagagctagaaatagcaagttaaaataaggctagtccgttatcaacttgaaaaagtggcaccgagtcggtgcgccctgggccggtggctggaacacttatcactccgg

SEQ ID NO: 4831 - RNA, 133 nt, synthetic construct
  source 1..133: mol_type = other RNA
gttgccaagtgttccagccacgttttagagctagaaatagcaagttaaaataaggctagtccgttatcaacttgaaaaagtggcaccgagtcggtgcgccctgggccggtggctggaacacttaatattaccg

SEQ ID NO: 4832 - RNA, 133 nt, synthetic construct
  source 1..133: mol_type = other RNA
gttgccaagtgttccagccacgttttagagctagaaatagcaagttaaaataaggctagtccgttatcaacttgaaaaagtggcaccgagtcggtgcgccctgggccggtggctggaacacttaaaattaccg

SEQ ID NO: 4833 - RNA, 133 nt, synthetic construct
  source 1..133: mol_type = other RNA
gttgccaagtgttccagccacgttttagagctagaaatagcaagttaaaataaggctagtccgttatcaacttgaaaaagtggcaccgagtcggtgcgccctgggccggtggctggaacacttatgaatcacc

SEQ ID NO: 4834 - RNA, 133 nt, synthetic construct
  source 1..133: mol_type = other RNA
gttgccaagtgttccagccacgttttagagctagaaatagcaagttaaaataaggctagtccgttatcaacttgaaaaagtggcaccgagtcggtgcgccctgggccggtggctggaacacttataaatcacc

SEQ ID NO: 4835 - RNA, 133 nt, synthetic construct
  source 1..133: mol_type = other RNA
gttgccaagtgttccagccacgttttagagctagaaatagcaagttaaaataaggctagtccgttatcaacttgaaaaagtggcaccgagtcggtgcgccctgggccggtggctggaacacttaataccccac

SEQ ID NO: 4836 - RNA, 133 nt, synthetic construct
  source 1..133: mol_type = other RNA
gttgccaagtgttccagccacgttttagagctagaaatagcaagttaaaataaggctagtccgttatcaacttgaaaaagtggcaccgagtcggtgcgccctgggccggtggctggaacacttataaccccac

SEQ ID NO: 4837 - RNA, 133 nt, synthetic construct
  source 1..133: mol_type = other RNA
gttgccaagtgttccagccacgttttagagctagaaatagcaagttaaaataaggctagtccgttatcaacttgaaaaagtggcaccgagtcggtgcgccctgggccggtggctggaacacttaaggacgcca

SEQ ID NO: 4838 - RNA, 133 nt, synthetic construct
  source 1..133: mol_type = other RNA
gttgccaagtgttccagccacgttttagagctagaaatagcaagttaaaataaggctagtccgttatcaacttgaaaaagtggcaccgagtcggtgcgccctgggccggtggctggaacacttatggacgcca

SEQ ID NO: 4839 - RNA, 133 nt, synthetic construct
  source 1..133: mol_type = other RNA
gttgccaagtgttccagccacgttttagagctagaaatagcaagttaaaataaggctagtccgttatcaacttgaaaaagtggcaccgagtcggtgcgccctgggccggtggctggaacacttaaaattagcc

SEQ ID NO: 4840 - RNA, 133 nt, synthetic construct
  source 1..133: mol_type = other RNA
gttgccaagtgttccagccacgttttagagctagaaatagcaagttaaaataaggctagtccgttatcaacttgaaaaagtggcaccgagtcggtgcgccctgggccggtggctggaacacttataattagcc

SEQ ID NO: 4841 - RNA, 133 nt, synthetic construct
  source 1..133: mol_type = other RNA
gttgccaagtgttccagccacgttttagagctagaaatagcaagttaaaataaggctagtccgttatcaacttgaaaaagtggcaccgagtcggtgcgccctgggccggtggctggaacacttaagaatcagc

SEQ ID NO: 4842 - RNA, 133 nt, synthetic construct
  source 1..133: mol_type = other RNA
gttgccaagtgttccagccacgttttagagctagaaatagcaagttaaaataaggctagtccgttatcaacttgaaaaagtggcaccgagtcggtgcgccctgggccggtggctggaacacttacgaatcagc

SEQ ID NO: 4843 - RNA, 133 nt, synthetic construct
  source 1..133: mol_type = other RNA
gttgccaagtgttccagccacgttttagagctagaaatagcaagttaaaataaggctagtccgttatcaacttgaaaaagtggcaccgagtcggtgcgccctgggccggtggctggaacacttcaaatgccag

SEQ ID NO: 4844 - RNA, 133 nt, synthetic construct
  source 1..133: mol_type = other RNA
gttgccaagtgttccagccacgttttagagctagaaatagcaagttaaaataaggctagtccgttatcaacttgaaaaagtggcaccgagtcggtgcgccctgggccggtggctggaacacttcaattgccag

SEQ ID NO: 4845 - RNA, 132 nt, synthetic construct
  source 1..132: mol_type = other RNA
gttgccaagtgttccagccacgttttagagctagaaatagcaagttaaaataaggctagtccgttatcaacttgaaaaagtggcaccgagtcggtgcgccctgggccggtggctggaacacttatacgtcca

SEQ ID NO: 4846 - RNA, 132 nt, synthetic construct
  source 1..132: mol_type = other RNA
gttgccaagtgttccagccacgttttagagctagaaatagcaagttaaaataaggctagtccgttatcaacttgaaaaagtggcaccgagtcggtgcgccctgggccggtggctggaacacttcttagtcca

SEQ ID NO: 4847 - RNA, 133 nt, synthetic construct
  source 1..133: mol_type = other RNA
gttgccaagtgttccagccacgttttagagctagaaatagcaagttaaaataaggctagtccgttatcaacttgaaaaagtggcaccgagtcggtgcgccctgggccggtggctggaacacttacgaagttcc

SEQ ID NO: 4848 - RNA, 133 nt, synthetic construct
  source 1..133: mol_type = other RNA
gttgccaagtgttccagccacgttttagagctagaaatagcaagttaaaataaggctagtccgttatcaacttgaaaaagtggcaccgagtcggtgcgccctgggccggtggctggaacacttatcaagttcc

SEQ ID NO: 4849 - RNA, 132 nt, synthetic construct
  source 1..132: mol_type = other RNA
gttgccaagtgttccagccacgttttagagctagaaatagcaagttaaaataaggctagtccgttatcaacttgaaaaagtggcaccgagtcggtgcgccctgggccggtggctggaacacttatacggttc

SEQ ID NO: 4850 - RNA, 132 nt, synthetic construct
  source 1..132: mol_type = other RNA
gttgccaagtgttccagccacgttttagagctagaaatagcaagttaaaataaggctagtccgttatcaacttgaaaaagtggcaccgagtcggtgcgccctgggccggtggctggaacacttattcggttc

SEQ ID NO: 4851 - RNA, 133 nt, synthetic construct
  source 1..133: mol_type = other RNA
gttgccaagtgttccagccacgttttagagctagaaatagcaagttaaaataaggctagtccgttatcaacttgaaaaagtggcaccgagtcggtgcgccctgggccggtggctggaacacttatatcgtgtt

SEQ ID NO: 4852 - RNA, 133 nt, synthetic construct
  source 1..133: mol_type = other RNA
gttgccaagtgttccagccacgttttagagctagaaatagcaagttaaaataaggctagtccgttatcaacttgaaaaagtggcaccgagtcggtgcgccctgggccggtggctggaacacttcccacgtgtt

SEQ ID NO: 4853 - RNA, 130 nt, synthetic construct
  source 1..130: mol_type = other RNA
gttgccaagtgttccagccacgttttagagctagaaatagcaagttaaaataaggctagtccgttatcaacttgaaaaagtggcaccgagtcggtgcgccctgggccggtggctggaacacttaaagtgt

SEQ ID NO: 4854 - RNA, 130 nt, synthetic construct
  source 1..130: mol_type = other RNA
gttgccaagtgttccagccacgttttagagctagaaatagcaagttaaaataaggctagtccgttatcaacttgaaaaagtggcaccgagtcggtgcgccctgggccggtggctggaacacttacggtgt

SEQ ID NO: 4855 - RNA, 131 nt, synthetic construct
  source 1..131: mol_type = other RNA
gttgccaagtgttccagccacgttttagagctagaaatagcaagttaaaataaggctagtccgttatcaacttgaaaaagtggcaccgagtcggtgcgccctgggccggtggctggaacacttcataagtg

SEQ ID NO: 4856 - RNA, 131 nt, synthetic construct
  source 1..131: mol_type = other RNA
gttgccaagtgttccagccacgttttagagctagaaatagcaagttaaaataaggctagtccgttatcaacttgaaaaagtggcaccgagtcggtgcgccctgggccggtggctggaacacttatcaagtg

SEQ ID NO: 4857 - RNA, 132 nt, synthetic construct
  source 1..132: mol_type = other RNA
gttgccaagtgttccagccacgttttagagctagaaatagcaagttaaaataaggctagtccgttatcaacttgaaaaagtggcaccgagtcggtgcgccctgggccggtggctggaacacttactataagt

SEQ ID NO: 4858 - RNA, 132 nt, synthetic construct
  source 1..132: mol_type = other RNA
gttgccaagtgttccagccacgttttagagctagaaatagcaagttaaaataaggctagtccgttatcaacttgaaaaagtggcaccgagtcggtgcgccctgggccggtggctggaacacttatcgtaagt

SEQ ID NO: 4859 - RNA, 135 nt, synthetic construct
  source 1..135: mol_type = other RNA
gttgccaagtgttccagccacgttttagagctagaaatagcaagttaaaataaggctagtccgttatcaacttgaaaaagtggcaccgagtcggtgcgccctgggccggtggctggaacacttatactgcagggc

SEQ ID NO: 4860 - RNA, 135 nt, synthetic construct
  source 1..135: mol_type = other RNA
gttgccaagtgttccagccacgttttagagctagaaatagcaagttaaaataaggctagtccgttatcaacttgaaaaagtggcaccgagtcggtgcgccctgggccggtggctggaacacttctaattcagggc

SEQ ID NO: 4861 - RNA, 135 nt, synthetic construct
  source 1..135: mol_type = other RNA
gttgccaagtgttccagccacgttttagagctagaaatagcaagttaaaataaggctagtccgttatcaacttgaaaaagtggcaccgagtcggtgcgccctgggccggtggctggaacacttctaattccaggg

SEQ ID NO: 4862 - RNA, 135 nt, synthetic construct
  source 1..135: mol_type = other RNA
gttgccaagtgttccagccacgttttagagctagaaatagcaagttaaaataaggctagtccgttatcaacttgaaaaagtggcaccgagtcggtgcgccctgggccggtggctggaacacttatctatccaggg

SEQ ID NO: 4863 - RNA, 135 nt, synthetic construct
  source 1..135: mol_type = other RNA
gttgccaagtgttccagccacgttttagagctagaaatagcaagttaaaataaggctagtccgttatcaacttgaaaaagtggcaccgagtcggtgcgccctgggccggtggctggaacacttaatgctcccagg

SEQ ID NO: 4864 - RNA, 135 nt, synthetic construct
  source 1..135: mol_type = other RNA
gttgccaagtgttccagccacgttttagagctagaaatagcaagttaaaataaggctagtccgttatcaacttgaaaaagtggcaccgagtcggtgcgccctgggccggtggctggaacacttctctcccccagg

SEQ ID NO: 4865 - RNA, 135 nt, synthetic construct
  source 1..135: mol_type = other RNA
gttgccaagtgttccagccacgttttagagctagaaatagcaagttaaaataaggctagtccgttatcaacttgaaaaagtggcaccgagtcggtgcgccctgggccggtggctggaacacttattgctgcccag

SEQ ID NO: 4866 - RNA, 135 nt, synthetic construct
  source 1..135: mol_type = other RNA
gttgccaagtgttccagccacgttttagagctagaaatagcaagttaaaataaggctagtccgttatcaacttgaaaaagtggcaccgagtcggtgcgccctgggccggtggctggaacacttaaggtcgcccag

SEQ ID NO: 4867 - RNA, 135 nt, synthetic construct
  source 1..135: mol_type = other RNA
gttgccaagtgttccagccacgttttagagctagaaatagcaagttaaaataaggctagtccgttatcaacttgaaaaagtggcaccgagtcggtgcgccctgggccggtggctggaacacttcatgttggccca

SEQ ID NO: 4868 - RNA, 135 nt, synthetic construct
  source 1..135: mol_type = other RNA
gttgccaagtgttccagccacgttttagagctagaaatagcaagttaaaataaggctagtccgttatcaacttgaaaaagtggcaccgagtcggtgcgccctgggccggtggctggaacacttactcttggccca

SEQ ID NO: 4869 - RNA, 135 nt, synthetic construct
  source 1..135: mol_type = other RNA
gttgccaagtgttccagccacgttttagagctagaaatagcaagttaaaataaggctagtccgttatcaacttgaaaaagtggcaccgagtcggtgcgccctgggccggtggctggaacacttacaattcggccc

SEQ ID NO: 4870 - RNA, 135 nt, synthetic construct
  source 1..135: mol_type = other RNA
gttgccaagtgttccagccacgttttagagctagaaatagcaagttaaaataaggctagtccgttatcaacttgaaaaagtggcaccgagtcggtgcgccctgggccggtggctggaacacttacgattcggccc

SEQ ID NO: 4871 - RNA, 135 nt, synthetic construct
  source 1..135: mol_type = other RNA
gttgccaagtgttccagccacgttttagagctagaaatagcaagttaaaataaggctagtccgttatcaacttgaaaaagtggcaccgagtcggtgcgccctgggccggtggctggaacacttaaaatcccggcc

SEQ ID NO: 4872 - RNA, 135 nt, synthetic construct
  source 1..135: mol_type = other RNA
gttgccaagtgttccagccacgttttagagctagaaatagcaagttaaaataaggctagtccgttatcaacttgaaaaagtggcaccgagtcggtgcgccctgggccggtggctggaacacttaatatcccggcc

SEQ ID NO: 4873 - RNA, 134 nt, synthetic construct
  source 1..134: mol_type = other RNA
gttgccaagtgttccagccacgttttagagctagaaatagcaagttaaaataaggctagtccgttatcaacttgaaaaagtggcaccgagtcggtgcgccctgggccggtggctggaacacttattagaccggc

SEQ ID NO: 4874 - RNA, 135 nt, synthetic construct
  source 1..135: mol_type = other RNA
gttgccaagtgttccagccacgttttagagctagaaatagcaagttaaaataaggctagtccgttatcaacttgaaaaagtggcaccgagtcggtgcgccctgggccggtggctggaacacttaaaattaccggc

SEQ ID NO: 4875 - RNA, 135 nt, synthetic construct
  source 1..135: mol_type = other RNA
gttgccaagtgttccagccacgttttagagctagaaatagcaagttaaaataaggctagtccgttatcaacttgaaaaagtggcaccgagtcggtgcgccctgggccggtggctggaacacttatatatcaccgg

SEQ ID NO: 4876 - RNA, 135 nt, synthetic construct
  source 1..135: mol_type = other RNA
gttgccaagtgttccagccacgttttagagctagaaatagcaagttaaaataaggctagtccgttatcaacttgaaaaagtggcaccgagtcggtgcgccctgggccggtggctggaacacttaaatatcaccgg

SEQ ID NO: 4877 - RNA, 133 nt, synthetic construct
  source 1..133: mol_type = other RNA
gttgccaagtgttccagccacgttttagagctagaaatagcaagttaaaataaggctagtccgttatcaacttgaaaaagtggcaccgagtcggtgcgccctgggccggtggctggaacacttaatcccaccg

SEQ ID NO: 4878 - RNA, 135 nt, synthetic construct
  source 1..135: mol_type = other RNA
gttgccaagtgttccagccacgttttagagctagaaatagcaagttaaaataaggctagtccgttatcaacttgaaaaagtggcaccgagtcggtgcgccctgggccggtggctggaacacttaatgtcccaccg

SEQ ID NO: 4879 - RNA, 135 nt, synthetic construct
  source 1..135: mol_type = other RNA
gttgccaagtgttccagccacgttttagagctagaaatagcaagttaaaataaggctagtccgttatcaacttgaaaaagtggcaccgagtcggtgcgccctgggccggtggctggaacacttaatgtcgccacc

SEQ ID NO: 4880 - RNA, 135 nt, synthetic construct
  source 1..135: mol_type = other RNA
gttgccaagtgttccagccacgttttagagctagaaatagcaagttaaaataaggctagtccgttatcaacttgaaaaagtggcaccgagtcggtgcgccctgggccggtggctggaacacttaaggacgccacc

SEQ ID NO: 4881 - RNA, 135 nt, synthetic construct
  source 1..135: mol_type = other RNA
gttgccaagtgttccagccacgttttagagctagaaatagcaagttaaaataaggctagtccgttatcaacttgaaaaagtggcaccgagtcggtgcgccctgggccggtggctggaacacttaatattagccac

SEQ ID NO: 4882 - RNA, 135 nt, synthetic construct
  source 1..135: mol_type = other RNA
gttgccaagtgttccagccacgttttagagctagaaatagcaagttaaaataaggctagtccgttatcaacttgaaaaagtggcaccgagtcggtgcgccctgggccggtggctggaacacttcacattagccac

SEQ ID NO: 4883 - RNA, 135 nt, synthetic construct
  source 1..135: mol_type = other RNA
gttgccaagtgttccagccacgttttagagctagaaatagcaagttaaaataaggctagtccgttatcaacttgaaaaagtggcaccgagtcggtgcgccctgggccggtggctggaacacttaagaatcagcca

SEQ ID NO: 4884 - RNA, 135 nt, synthetic construct
  source 1..135: mol_type = other RNA
gttgccaagtgttccagccacgttttagagctagaaatagcaagttaaaataaggctagtccgttatcaacttgaaaaagtggcaccgagtcggtgcgccctgggccggtggctggaacacttcagaatcagcca

SEQ ID NO: 4885 - RNA, 135 nt, synthetic construct
  source 1..135: mol_type = other RNA
gttgccaagtgttccagccacgttttagagctagaaatagcaagttaaaataaggctagtccgttatcaacttgaaaaagtggcaccgagtcggtgcgccctgggccggtggctggaacacttcaatatccagcc

SEQ ID NO: 4886 - RNA, 135 nt, synthetic construct
  source 1..135: mol_type = other RNA
gttgccaagtgttccagccacgttttagagctagaaatagcaagttaaaataaggctagtccgttatcaacttgaaaaagtggcaccgagtcggtgcgccctgggccggtggctggaacacttccgcatccagcc

SEQ ID NO: 4887 - RNA, 135 nt, synthetic construct
  source 1..135: mol_type = other RNA
gttgccaagtgttccagccacgttttagagctagaaatagcaagttaaaataaggctagtccgttatcaacttgaaaaagtggcaccgagtcggtgcgccctgggccggtggctggaacacttctagagtccagc

SEQ ID NO: 4888 - RNA, 135 nt, synthetic construct
  source 1..135: mol_type = other RNA
gttgccaagtgttccagccacgttttagagctagaaatagcaagttaaaataaggctagtccgttatcaacttgaaaaagtggcaccgagtcggtgcgccctgggccggtggctggaacacttaaagagtccagc

SEQ ID NO: 4889 - RNA, 135 nt, synthetic construct
  source 1..135: mol_type = other RNA
gttgccaagtgttccagccacgttttagagctagaaatagcaagttaaaataaggctagtccgttatcaacttgaaaaagtggcaccgagtcggtgcgccctgggccggtggctggaacacttctagcattccag

SEQ ID NO: 4890 - RNA, 135 nt, synthetic construct
  source 1..135: mol_type = other RNA
gttgccaagtgttccagccacgttttagagctagaaatagcaagttaaaataaggctagtccgttatcaacttgaaaaagtggcaccgagtcggtgcgccctgggccggtggctggaacacttctcgagttccag

SEQ ID NO: 4891 - RNA, 134 nt, synthetic construct
  source 1..134: mol_type = other RNA
gttgccaagtgttccagccacgttttagagctagaaatagcaagttaaaataaggctagtccgttatcaacttgaaaaagtggcaccgagtcggtgcgccctgggccggtggctggaacacttcctcggttcca

SEQ ID NO: 4892 - RNA, 134 nt, synthetic construct
  source 1..134: mol_type = other RNA
gttgccaagtgttccagccacgttttagagctagaaatagcaagttaaaataaggctagtccgttatcaacttgaaaaagtggcaccgagtcggtgcgccctgggccggtggctggaacacttatacggttcca

SEQ ID NO: 4893 - RNA, 135 nt, synthetic construct
  source 1..135: mol_type = other RNA
gttgccaagtgttccagccacgttttagagctagaaatagcaagttaaaataaggctagtccgttatcaacttgaaaaagtggcaccgagtcggtgcgccctgggccggtggctggaacacttattacgtgttcc

SEQ ID NO: 4894 - RNA, 135 nt, synthetic construct
  source 1..135: mol_type = other RNA
gttgccaagtgttccagccacgttttagagctagaaatagcaagttaaaataaggctagtccgttatcaacttgaaaaagtggcaccgagtcggtgcgccctgggccggtggctggaacacttaagacgtgttcc

SEQ ID NO: 4895 - RNA, 132 nt, synthetic construct
  source 1..132: mol_type = other RNA
gttgccaagtgttccagccacgttttagagctagaaatagcaagttaaaataaggctagtccgttatcaacttgaaaaagtggcaccgagtcggtgcgccctgggccggtggctggaacacttctagtgttc

SEQ ID NO: 4896 - RNA, 132 nt, synthetic construct
  source 1..132: mol_type = other RNA
gttgccaagtgttccagccacgttttagagctagaaatagcaagttaaaataaggctagtccgttatcaacttgaaaaagtggcaccgagtcggtgcgccctgggccggtggctggaacacttccggtgttc

SEQ ID NO: 4897 - RNA, 133 nt, synthetic construct
  source 1..133: mol_type = other RNA
gttgccaagtgttccagccacgttttagagctagaaatagcaagttaaaataaggctagtccgttatcaacttgaaaaagtggcaccgagtcggtgcgccctgggccggtggctggaacacttcaaaagtgtt

SEQ ID NO: 4898 - RNA, 133 nt, synthetic construct
  source 1..133: mol_type = other RNA
gttgccaagtgttccagccacgttttagagctagaaatagcaagttaaaataaggctagtccgttatcaacttgaaaaagtggcaccgagtcggtgcgccctgggccggtggctggaacacttcccaagtgtt

SEQ ID NO: 4899 - RNA, 134 nt, synthetic construct
  source 1..134: mol_type = other RNA
gttgccaagtgttccagccacgttttagagctagaaatagcaagttaaaataaggctagtccgttatcaacttgaaaaagtggcaccgagtcggtgcgccctgggccggtggctggaacacttaaattaagtgt

SEQ ID NO: 4900 - RNA, 134 nt, synthetic construct
  source 1..134: mol_type = other RNA
gttgccaagtgttccagccacgttttagagctagaaatagcaagttaaaataaggctagtccgttatcaacttgaaaaagtggcaccgagtcggtgcgccctgggccggtggctggaacacttacgataagtgt

SEQ ID NO: 4901 - RNA, 137 nt, synthetic construct
  source 1..137: mol_type = other RNA
gttgccaagtgttccagccacgttttagagctagaaatagcaagttaaaataaggctagtccgttatcaacttgaaaaagtggcaccgagtcggtgcgccctgggccggtggctggaacacttaatgctcccagggc

SEQ ID NO: 4902 - RNA, 137 nt, synthetic construct
  source 1..137: mol_type = other RNA
gttgccaagtgttccagccacgttttagagctagaaatagcaagttaaaataaggctagtccgttatcaacttgaaaaagtggcaccgagtcggtgcgccctgggccggtggctggaacacttatacaccccagggc

SEQ ID NO: 4903 - RNA, 137 nt, synthetic construct
  source 1..137: mol_type = other RNA
gttgccaagtgttccagccacgttttagagctagaaatagcaagttaaaataaggctagtccgttatcaacttgaaaaagtggcaccgagtcggtgcgccctgggccggtggctggaacacttattgctgcccaggg

SEQ ID NO: 4904 - RNA, 137 nt, synthetic construct
  source 1..137: mol_type = other RNA
gttgccaagtgttccagccacgttttagagctagaaatagcaagttaaaataaggctagtccgttatcaacttgaaaaagtggcaccgagtcggtgcgccctgggccggtggctggaacacttacaatcgcccaggg

SEQ ID NO: 4905 - RNA, 137 nt, synthetic construct
  source 1..137: mol_type = other RNA
gttgccaagtgttccagccacgttttagagctagaaatagcaagttaaaataaggctagtccgttatcaacttgaaaaagtggcaccgagtcggtgcgccctgggccggtggctggaacacttcatgttggcccagg

SEQ ID NO: 4906 - RNA, 137 nt, synthetic construct
  source 1..137: mol_type = other RNA
gttgccaagtgttccagccacgttttagagctagaaatagcaagttaaaataaggctagtccgttatcaacttgaaaaagtggcaccgagtcggtgcgccctgggccggtggctggaacacttactcttggcccagg

SEQ ID NO: 4907 - RNA, 137 nt, synthetic construct
  source 1..137: mol_type = other RNA
gttgccaagtgttccagccacgttttagagctagaaatagcaagttaaaataaggctagtccgttatcaacttgaaaaagtggcaccgagtcggtgcgccctgggccggtggctggaacacttacaattcggcccag

SEQ ID NO: 4908 - RNA, 137 nt, synthetic construct
  source 1..137: mol_type = other RNA
gttgccaagtgttccagccacgttttagagctagaaatagcaagttaaaataaggctagtccgttatcaacttgaaaaagtggcaccgagtcggtgcgccctgggccggtggctggaacacttataggtcggcccag

SEQ ID NO: 4909 - RNA, 137 nt, synthetic construct
  source 1..137: mol_type = other RNA
gttgccaagtgttccagccacgttttagagctagaaatagcaagttaaaataaggctagtccgttatcaacttgaaaaagtggcaccgagtcggtgcgccctgggccggtggctggaacacttaatatcccggccca

SEQ ID NO: 4910 - RNA, 137 nt, synthetic construct
  source 1..137: mol_type = other RNA
gttgccaagtgttccagccacgttttagagctagaaatagcaagttaaaataaggctagtccgttatcaacttgaaaaagtggcaccgagtcggtgcgccctgggccggtggctggaacacttaaaatcccggccca

SEQ ID NO: 4911 - RNA, 136 nt, synthetic construct
  source 1..136: mol_type = other RNA
gttgccaagtgttccagccacgttttagagctagaaatagcaagttaaaataaggctagtccgttatcaacttgaaaaagtggcaccgagtcggtgcgccctgggccggtggctggaacacttattagaccggccc

SEQ ID NO: 4912 - RNA, 137 nt, synthetic construct
  source 1..137: mol_type = other RNA
gttgccaagtgttccagccacgttttagagctagaaatagcaagttaaaataaggctagtccgttatcaacttgaaaaagtggcaccgagtcggtgcgccctgggccggtggctggaacacttaatattaccggccc

SEQ ID NO: 4913 - RNA, 137 nt, synthetic construct
  source 1..137: mol_type = other RNA
gttgccaagtgttccagccacgttttagagctagaaatagcaagttaaaataaggctagtccgttatcaacttgaaaaagtggcaccgagtcggtgcgccctgggccggtggctggaacacttaattatcaccggcc

SEQ ID NO: 4914 - RNA, 137 nt, synthetic construct
  source 1..137: mol_type = other RNA
gttgccaagtgttccagccacgttttagagctagaaatagcaagttaaaataaggctagtccgttatcaacttgaaaaagtggcaccgagtcggtgcgccctgggccggtggctggaacacttataaatcaccggcc

SEQ ID NO: 4915 - RNA, 137 nt, synthetic construct
  source 1..137: mol_type = other RNA
gttgccaagtgttccagccacgttttagagctagaaatagcaagttaaaataaggctagtccgttatcaacttgaaaaagtggcaccgagtcggtgcgccctgggccggtggctggaacacttatggacccaccggc

SEQ ID NO: 4916 - RNA, 135 nt, synthetic construct
  source 1..135: mol_type = other RNA
gttgccaagtgttccagccacgttttagagctagaaatagcaagttaaaataaggctagtccgttatcaacttgaaaaagtggcaccgagtcggtgcgccctgggccggtggctggaacacttaatcccaccggc

SEQ ID NO: 4917 - RNA, 137 nt, synthetic construct
  source 1..137: mol_type = other RNA
gttgccaagtgttccagccacgttttagagctagaaatagcaagttaaaataaggctagtccgttatcaacttgaaaaagtggcaccgagtcggtgcgccctgggccggtggctggaacacttacggtcgccaccgg

SEQ ID NO: 4918 - RNA, 137 nt, synthetic construct
  source 1..137: mol_type = other RNA
gttgccaagtgttccagccacgttttagagctagaaatagcaagttaaaataaggctagtccgttatcaacttgaaaaagtggcaccgagtcggtgcgccctgggccggtggctggaacacttaatgtcgccaccgg

SEQ ID NO: 4919 - RNA, 137 nt, synthetic construct
  source 1..137: mol_type = other RNA
gttgccaagtgttccagccacgttttagagctagaaatagcaagttaaaataaggctagtccgttatcaacttgaaaaagtggcaccgagtcggtgcgccctgggccggtggctggaacacttattattagccaccg

SEQ ID NO: 4920 - RNA, 137 nt, synthetic construct
  source 1..137: mol_type = other RNA
gttgccaagtgttccagccacgttttagagctagaaatagcaagttaaaataaggctagtccgttatcaacttgaaaaagtggcaccgagtcggtgcgccctgggccggtggctggaacacttcagattagccaccg

SEQ ID NO: 4921 - RNA, 137 nt, synthetic construct
  source 1..137: mol_type = other RNA
gttgccaagtgttccagccacgttttagagctagaaatagcaagttaaaataaggctagtccgttatcaacttgaaaaagtggcaccgagtcggtgcgccctgggccggtggctggaacacttaagaatcagccacc

SEQ ID NO: 4922 - RNA, 137 nt, synthetic construct
  source 1..137: mol_type = other RNA
gttgccaagtgttccagccacgttttagagctagaaatagcaagttaaaataaggctagtccgttatcaacttgaaaaagtggcaccgagtcggtgcgccctgggccggtggctggaacacttacgaatcagccacc

SEQ ID NO: 4923 - RNA, 137 nt, synthetic construct
  source 1..137: mol_type = other RNA
gttgccaagtgttccagccacgttttagagctagaaatagcaagttaaaataaggctagtccgttatcaacttgaaaaagtggcaccgagtcggtgcgccctgggccggtggctggaacacttactaatccagccac

SEQ ID NO: 4924 - RNA, 137 nt, synthetic construct
  source 1..137: mol_type = other RNA
gttgccaagtgttccagccacgttttagagctagaaatagcaagttaaaataaggctagtccgttatcaacttgaaaaagtggcaccgagtcggtgcgccctgggccggtggctggaacacttccttatccagccac

SEQ ID NO: 4925 - RNA, 137 nt, synthetic construct
  source 1..137: mol_type = other RNA
gttgccaagtgttccagccacgttttagagctagaaatagcaagttaaaataaggctagtccgttatcaacttgaaaaagtggcaccgagtcggtgcgccctgggccggtggctggaacacttcaagagtccagcca

SEQ ID NO: 4926 - RNA, 137 nt, synthetic construct
  source 1..137: mol_type = other RNA
gttgccaagtgttccagccacgttttagagctagaaatagcaagttaaaataaggctagtccgttatcaacttgaaaaagtggcaccgagtcggtgcgccctgggccggtggctggaacacttcccgagtccagcca

SEQ ID NO: 4927 - RNA, 137 nt, synthetic construct
  source 1..137: mol_type = other RNA
gttgccaagtgttccagccacgttttagagctagaaatagcaagttaaaataaggctagtccgttatcaacttgaaaaagtggcaccgagtcggtgcgccctgggccggtggctggaacacttataacgttccagcc

SEQ ID NO: 4928 - RNA, 137 nt, synthetic construct
  source 1..137: mol_type = other RNA
gttgccaagtgttccagccacgttttagagctagaaatagcaagttaaaataaggctagtccgttatcaacttgaaaaagtggcaccgagtcggtgcgccctgggccggtggctggaacacttcctaagttccagcc

SEQ ID NO: 4929 - RNA, 136 nt, synthetic construct
  source 1..136: mol_type = other RNA
gttgccaagtgttccagccacgttttagagctagaaatagcaagttaaaataaggctagtccgttatcaacttgaaaaagtggcaccgagtcggtgcgccctgggccggtggctggaacacttattcggttccagc

SEQ ID NO: 4930 - RNA, 136 nt, synthetic construct
  source 1..136: mol_type = other RNA
gttgccaagtgttccagccacgttttagagctagaaatagcaagttaaaataaggctagtccgttatcaacttgaaaaagtggcaccgagtcggtgcgccctgggccggtggctggaacacttaatcggttccagc

SEQ ID NO: 4931 - RNA, 137 nt, synthetic construct
  source 1..137: mol_type = other RNA
gttgccaagtgttccagccacgttttagagctagaaatagcaagttaaaataaggctagtccgttatcaacttgaaaaagtggcaccgagtcggtgcgccctgggccggtggctggaacacttctgacgtgttccag

SEQ ID NO: 4932 - RNA, 137 nt, synthetic construct
  source 1..137: mol_type = other RNA
gttgccaagtgttccagccacgttttagagctagaaatagcaagttaaaataaggctagtccgttatcaacttgaaaaagtggcaccgagtcggtgcgccctgggccggtggctggaacacttaatacgtgttccag

SEQ ID NO: 4933 - RNA, 134 nt, synthetic construct
  source 1..134: mol_type = other RNA
gttgccaagtgttccagccacgttttagagctagaaatagcaagttaaaataaggctagtccgttatcaacttgaaaaagtggcaccgagtcggtgcgccctgggccggtggctggaacacttcaagtgttcca

SEQ ID NO: 4934 - RNA, 134 nt, synthetic construct
  source 1..134: mol_type = other RNA
gttgccaagtgttccagccacgttttagagctagaaatagcaagttaaaataaggctagtccgttatcaacttgaaaaagtggcaccgagtcggtgcgccctgggccggtggctggaacacttatggtgttcca

SEQ ID NO: 4935 - RNA, 135 nt, synthetic construct
  source 1..135: mol_type = other RNA
gttgccaagtgttccagccacgttttagagctagaaatagcaagttaaaataaggctagtccgttatcaacttgaaaaagtggcaccgagtcggtgcgccctgggccggtggctggaacacttcttaagtgttcc

SEQ ID NO: 4936 - RNA, 135 nt, synthetic construct
  source 1..135: mol_type = other RNA
gttgccaagtgttccagccacgttttagagctagaaatagcaagttaaaataaggctagtccgttatcaacttgaaaaagtggcaccgagtcggtgcgccctgggccggtggctggaacacttctgaagtgttcc

SEQ ID NO: 4937 - RNA, 136 nt, synthetic construct
  source 1..136: mol_type = other RNA
gttgccaagtgttccagccacgttttagagctagaaatagcaagttaaaataaggctagtccgttatcaacttgaaaaagtggcaccgagtcggtgcgccctgggccggtggctggaacacttaacctaagtgttc

SEQ ID NO: 4938 - RNA, 136 nt, synthetic construct
  source 1..136: mol_type = other RNA
gttgccaagtgttccagccacgttttagagctagaaatagcaagttaaaataaggctagtccgttatcaacttgaaaaagtggcaccgagtcggtgcgccctgggccggtggctggaacacttatgataagtgttc

SEQ ID NO: 4939 - RNA, 121 nt, synthetic construct
  source 1..121: mol_type = other RNA
gtcaccaggaacatgtacctggttttagagctagaaatagcaagttaaaataaggctagtccgttatcaacttgaaaaagtggcaccgagtcggtgcttcccccaggtgtacatgttcctg

SEQ ID NO: 4940 - RNA, 131 nt, synthetic construct
  source 1..131: mol_type = other RNA
gtcaccaggaacatgtacctggttttagagctagaaatagcaagttaaaataaggctagtccgttatcaacttgaaaaagtggcaccgagtcggtgcttcccccaggtgtacatgttcctgttgtacggaa

SEQ ID NO: 4941 - RNA, 131 nt, synthetic construct
  source 1..131: mol_type = other RNA
gtcaccaggaacatgtacctggttttagagctagaaatagcaagttaaaataaggctagtccgttatcaacttgaaaaagtggcaccgagtcggtgcttcccccaggtgtacatgttcctgctgtatggaa

SEQ ID NO: 4942 - RNA, 131 nt, synthetic construct
  source 1..131: mol_type = other RNA
gtcaccaggaacatgtacctggttttagagctagaaatagcaagttaaaataaggctagtccgttatcaacttgaaaaagtggcaccgagtcggtgcttcccccaggtgtacatgttcctgaatgtaggga

SEQ ID NO: 4943 - RNA, 131 nt, synthetic construct
  source 1..131: mol_type = other RNA
gtcaccaggaacatgtacctggttttagagctagaaatagcaagttaaaataaggctagtccgttatcaacttgaaaaagtggcaccgagtcggtgcttcccccaggtgtacatgttcctgttatacggga

SEQ ID NO: 4944 - RNA, 131 nt, synthetic construct
  source 1..131: mol_type = other RNA
gtcaccaggaacatgtacctggttttagagctagaaatagcaagttaaaataaggctagtccgttatcaacttgaaaaagtggcaccgagtcggtgcttcccccaggtgtacatgttcctgtcgtaggggg

SEQ ID NO: 4945 - RNA, 131 nt, synthetic construct
  source 1..131: mol_type = other RNA
gtcaccaggaacatgtacctggttttagagctagaaatagcaagttaaaataaggctagtccgttatcaacttgaaaaagtggcaccgagtcggtgcttcccccaggtgtacatgttcctgataacggggg

SEQ ID NO: 4946 - RNA, 131 nt, synthetic construct
  source 1..131: mol_type = other RNA
gtcaccaggaacatgtacctggttttagagctagaaatagcaagttaaaataaggctagtccgttatcaacttgaaaaagtggcaccgagtcggtgcttcccccaggtgtacatgttcctgatcgttgggg

SEQ ID NO: 4947 - RNA, 131 nt, synthetic construct
  source 1..131: mol_type = other RNA
gtcaccaggaacatgtacctggttttagagctagaaatagcaagttaaaataaggctagtccgttatcaacttgaaaaagtggcaccgagtcggtgcttcccccaggtgtacatgttcctgatctccgggg

SEQ ID NO: 4948 - RNA, 131 nt, synthetic construct
  source 1..131: mol_type = other RNA
gtcaccaggaacatgtacctggttttagagctagaaatagcaagttaaaataaggctagtccgttatcaacttgaaaaagtggcaccgagtcggtgcttcccccaggtgtacatgttcctgcctcgttggg

SEQ ID NO: 4949 - RNA, 131 nt, synthetic construct
  source 1..131: mol_type = other RNA
gtcaccaggaacatgtacctggttttagagctagaaatagcaagttaaaataaggctagtccgttatcaacttgaaaaagtggcaccgagtcggtgcttcccccaggtgtacatgttcctgaaacgttggg

SEQ ID NO: 4950 - RNA, 131 nt, synthetic construct
  source 1..131: mol_type = other RNA
gtcaccaggaacatgtacctggttttagagctagaaatagcaagttaaaataaggctagtccgttatcaacttgaaaaagtggcaccgagtcggtgcttcccccaggtgtacatgttcctgcttagtctgg

SEQ ID NO: 4951 - RNA, 131 nt, synthetic construct
  source 1..131: mol_type = other RNA
gtcaccaggaacatgtacctggttttagagctagaaatagcaagttaaaataaggctagtccgttatcaacttgaaaaagtggcaccgagtcggtgcttcccccaggtgtacatgttcctgcgaatgctgg

SEQ ID NO: 4952 - RNA, 131 nt, synthetic construct
  source 1..131: mol_type = other RNA
gtcaccaggaacatgtacctggttttagagctagaaatagcaagttaaaataaggctagtccgttatcaacttgaaaaagtggcaccgagtcggtgcttcccccaggtgtacatgttcctgcttccccctg

SEQ ID NO: 4953 - RNA, 131 nt, synthetic construct
  source 1..131: mol_type = other RNA
gtcaccaggaacatgtacctggttttagagctagaaatagcaagttaaaataaggctagtccgttatcaacttgaaaaagtggcaccgagtcggtgcttcccccaggtgtacatgttcctgctctcccctg

SEQ ID NO: 4954 - RNA, 131 nt, synthetic construct
  source 1..131: mol_type = other RNA
gtcaccaggaacatgtacctggttttagagctagaaatagcaagttaaaataaggctagtccgttatcaacttgaaaaagtggcaccgagtcggtgcttcccccaggtgtacatgttcctgctatctacct

SEQ ID NO: 4955 - RNA, 131 nt, synthetic construct
  source 1..131: mol_type = other RNA
gtcaccaggaacatgtacctggttttagagctagaaatagcaagttaaaataaggctagtccgttatcaacttgaaaaagtggcaccgagtcggtgcttcccccaggtgtacatgttcctgccaattacct

SEQ ID NO: 4956 - RNA, 131 nt, synthetic construct
  source 1..131: mol_type = other RNA
gtcaccaggaacatgtacctggttttagagctagaaatagcaagttaaaataaggctagtccgttatcaacttgaaaaagtggcaccgagtcggtgcttcccccaggtgtacatgttcctgttatatcacc

SEQ ID NO: 4957 - RNA, 131 nt, synthetic construct
  source 1..131: mol_type = other RNA
gtcaccaggaacatgtacctggttttagagctagaaatagcaagttaaaataaggctagtccgttatcaacttgaaaaagtggcaccgagtcggtgcttcccccaggtgtacatgttcctgtctcatcacc

SEQ ID NO: 4958 - RNA, 131 nt, synthetic construct
  source 1..131: mol_type = other RNA
gtcaccaggaacatgtacctggttttagagctagaaatagcaagttaaaataaggctagtccgttatcaacttgaaaaagtggcaccgagtcggtgcttcccccaggtgtacatgttcctgccgataacac

SEQ ID NO: 4959 - RNA, 131 nt, synthetic construct
  source 1..131: mol_type = other RNA
gtcaccaggaacatgtacctggttttagagctagaaatagcaagttaaaataaggctagtccgttatcaacttgaaaaagtggcaccgagtcggtgcttcccccaggtgtacatgttcctgtcctatacac

SEQ ID NO: 4960 - RNA, 129 nt, synthetic construct
  source 1..129: mol_type = other RNA
gtcaccaggaacatgtacctggttttagagctagaaatagcaagttaaaataaggctagtccgttatcaacttgaaaaagtggcaccgagtcggtgcttcccccaggtgtacatgttcctgccattaca

SEQ ID NO: 4961 - RNA, 130 nt, synthetic construct
  source 1..130: mol_type = other RNA
gtcaccaggaacatgtacctggttttagagctagaaatagcaagttaaaataaggctagtccgttatcaacttgaaaaagtggcaccgagtcggtgcttcccccaggtgtacatgttcctgctacataca

SEQ ID NO: 4962 - RNA, 131 nt, synthetic construct
  source 1..131: mol_type = other RNA
gtcaccaggaacatgtacctggttttagagctagaaatagcaagttaaaataaggctagtccgttatcaacttgaaaaagtggcaccgagtcggtgcttcccccaggtgtacatgttcctgctaattgtac

SEQ ID NO: 4963 - RNA, 131 nt, synthetic construct
  source 1..131: mol_type = other RNA
gtcaccaggaacatgtacctggttttagagctagaaatagcaagttaaaataaggctagtccgttatcaacttgaaaaagtggcaccgagtcggtgcttcccccaggtgtacatgttcctgctagttgtac

SEQ ID NO: 4964 - RNA, 131 nt, synthetic construct
  source 1..131: mol_type = other RNA
gtcaccaggaacatgtacctggttttagagctagaaatagcaagttaaaataaggctagtccgttatcaacttgaaaaagtggcaccgagtcggtgcttcccccaggtgtacatgttcctgcccagatgta

SEQ ID NO: 4965 - RNA, 131 nt, synthetic construct
  source 1..131: mol_type = other RNA
gtcaccaggaacatgtacctggttttagagctagaaatagcaagttaaaataaggctagtccgttatcaacttgaaaaagtggcaccgagtcggtgcttcccccaggtgtacatgttcctgctgctgtgta

SEQ ID NO: 4966 - RNA, 131 nt, synthetic construct
  source 1..131: mol_type = other RNA
gtcaccaggaacatgtacctggttttagagctagaaatagcaagttaaaataaggctagtccgttatcaacttgaaaaagtggcaccgagtcggtgcttcccccaggtgtacatgttcctgccgttcatgt

SEQ ID NO: 4967 - RNA, 131 nt, synthetic construct
  source 1..131: mol_type = other RNA
gtcaccaggaacatgtacctggttttagagctagaaatagcaagttaaaataaggctagtccgttatcaacttgaaaaagtggcaccgagtcggtgcttcccccaggtgtacatgttcctgcctcacatgt

SEQ ID NO: 4968 - RNA, 130 nt, synthetic construct
  source 1..130: mol_type = other RNA
gtcaccaggaacatgtacctggttttagagctagaaatagcaagttaaaataaggctagtccgttatcaacttgaaaaagtggcaccgagtcggtgcttcccccaggtgtacatgttcctgcgtcacatg

SEQ ID NO: 4969 - RNA, 130 nt, synthetic construct
  source 1..130: mol_type = other RNA
gtcaccaggaacatgtacctggttttagagctagaaatagcaagttaaaataaggctagtccgttatcaacttgaaaaagtggcaccgagtcggtgcttcccccaggtgtacatgttcctgccccacatg

SEQ ID NO: 4970 - RNA, 131 nt, synthetic construct
  source 1..131: mol_type = other RNA
gtcaccaggaacatgtacctggttttagagctagaaatagcaagttaaaataaggctagtccgttatcaacttgaaaaagtggcaccgagtcggtgcttcccccaggtgtacatgttcctgctatctacat

SEQ ID NO: 4971 - RNA, 131 nt, synthetic construct
  source 1..131: mol_type = other RNA
gtcaccaggaacatgtacctggttttagagctagaaatagcaagttaaaataaggctagtccgttatcaacttgaaaaagtggcaccgagtcggtgcttcccccaggtgtacatgttcctgctatatacat

SEQ ID NO: 4972 - RNA, 131 nt, synthetic construct
  source 1..131: mol_type = other RNA
gtcaccaggaacatgtacctggttttagagctagaaatagcaagttaaaataaggctagtccgttatcaacttgaaaaagtggcaccgagtcggtgcttcccccaggtgtacatgttcctgctgaataaca

SEQ ID NO: 4973 - RNA, 131 nt, synthetic construct
  source 1..131: mol_type = other RNA
gtcaccaggaacatgtacctggttttagagctagaaatagcaagttaaaataaggctagtccgttatcaacttgaaaaagtggcaccgagtcggtgcttcccccaggtgtacatgttcctgcagaataaca

SEQ ID NO: 4974 - RNA, 131 nt, synthetic construct
  source 1..131: mol_type = other RNA
gtcaccaggaacatgtacctggttttagagctagaaatagcaagttaaaataaggctagtccgttatcaacttgaaaaagtggcaccgagtcggtgcttcccccaggtgtacatgttcctgctgacggaac

SEQ ID NO: 4975 - RNA, 131 nt, synthetic construct
  source 1..131: mol_type = other RNA
gtcaccaggaacatgtacctggttttagagctagaaatagcaagttaaaataaggctagtccgttatcaacttgaaaaagtggcaccgagtcggtgcttcccccaggtgtacatgttcctgcaatcggaac

SEQ ID NO: 4976 - RNA, 131 nt, synthetic construct
  source 1..131: mol_type = other RNA
gtcaccaggaacatgtacctggttttagagctagaaatagcaagttaaaataaggctagtccgttatcaacttgaaaaagtggcaccgagtcggtgcttcccccaggtgtacatgttcctgaatataggaa

SEQ ID NO: 4977 - RNA, 131 nt, synthetic construct
  source 1..131: mol_type = other RNA
gtcaccaggaacatgtacctggttttagagctagaaatagcaagttaaaataaggctagtccgttatcaacttgaaaaagtggcaccgagtcggtgcttcccccaggtgtacatgttcctgaaaataggaa

SEQ ID NO: 4978 - RNA, 131 nt, synthetic construct
  source 1..131: mol_type = other RNA
gtcaccaggaacatgtacctggttttagagctagaaatagcaagttaaaataaggctagtccgttatcaacttgaaaaagtggcaccgagtcggtgcttcccccaggtgtacatgttcctgctcaatagga

SEQ ID NO: 4979 - RNA, 131 nt, synthetic construct
  source 1..131: mol_type = other RNA
gtcaccaggaacatgtacctggttttagagctagaaatagcaagttaaaataaggctagtccgttatcaacttgaaaaagtggcaccgagtcggtgcttcccccaggtgtacatgttcctgctatatagga

SEQ ID NO: 4980 - RNA, 130 nt, synthetic construct
  source 1..130: mol_type = other RNA
gtcaccaggaacatgtacctggttttagagctagaaatagcaagttaaaataaggctagtccgttatcaacttgaaaaagtggcaccgagtcggtgcttcccccaggtgtacatgttcctgtcaaacagg

SEQ ID NO: 4981 - RNA, 130 nt, synthetic construct
  source 1..130: mol_type = other RNA
gtcaccaggaacatgtacctggttttagagctagaaatagcaagttaaaataaggctagtccgttatcaacttgaaaaagtggcaccgagtcggtgcttcccccaggtgtacatgttcctgtaaaacagg

SEQ ID NO: 4982 - RNA, 133 nt, synthetic construct
  source 1..133: mol_type = other RNA
gtcaccaggaacatgtacctggttttagagctagaaatagcaagttaaaataaggctagtccgttatcaacttgaaaaagtggcaccgagtcggtgcttcccccaggtgtacatgttcctgaaagccggggaa

SEQ ID NO: 4983 - RNA, 133 nt, synthetic construct
  source 1..133: mol_type = other RNA
gtcaccaggaacatgtacctggttttagagctagaaatagcaagttaaaataaggctagtccgttatcaacttgaaaaagtggcaccgagtcggtgcttcccccaggtgtacatgttcctgagagccggggaa

SEQ ID NO: 4984 - RNA, 133 nt, synthetic construct
  source 1..133: mol_type = other RNA
gtcaccaggaacatgtacctggttttagagctagaaatagcaagttaaaataaggctagtccgttatcaacttgaaaaagtggcaccgagtcggtgcttcccccaggtgtacatgttcctgagtggcggggga

SEQ ID NO: 4985 - RNA, 133 nt, synthetic construct
  source 1..133: mol_type = other RNA
gtcaccaggaacatgtacctggttttagagctagaaatagcaagttaaaataaggctagtccgttatcaacttgaaaaagtggcaccgagtcggtgcttcccccaggtgtacatgttcctgagaggcggggga

SEQ ID NO: 4986 - RNA, 132 nt, synthetic construct
  source 1..132: mol_type = other RNA
gtcaccaggaacatgtacctggttttagagctagaaatagcaagttaaaataaggctagtccgttatcaacttgaaaaagtggcaccgagtcggtgcttcccccaggtgtacatgttcctgagtcatggggg

SEQ ID NO: 4987 - RNA, 131 nt, synthetic construct
  source 1..131: mol_type = other RNA
gtcaccaggaacatgtacctggttttagagctagaaatagcaagttaaaataaggctagtccgttatcaacttgaaaaagtggcaccgagtcggtgcttcccccaggtgtacatgttcctgatggtggggg

SEQ ID NO: 4988 - RNA, 130 nt, synthetic construct
  source 1..130: mol_type = other RNA
gtcaccaggaacatgtacctggttttagagctagaaatagcaagttaaaataaggctagtccgttatcaacttgaaaaagtggcaccgagtcggtgcttcccccaggtgtacatgttcctgagtctgggg

SEQ ID NO: 4989 - RNA, 133 nt, synthetic construct
  source 1..133: mol_type = other RNA
gtcaccaggaacatgtacctggttttagagctagaaatagcaagttaaaataaggctagtccgttatcaacttgaaaaagtggcaccgagtcggtgcttcccccaggtgtacatgttcctgaaaagtctgggg

SEQ ID NO: 4990 - RNA, 133 nt, synthetic construct
  source 1..133: mol_type = other RNA
gtcaccaggaacatgtacctggttttagagctagaaatagcaagttaaaataaggctagtccgttatcaacttgaaaaagtggcaccgagtcggtgcttcccccaggtgtacatgttcctgatcttccctggg

SEQ ID NO: 4991 - RNA, 133 nt, synthetic construct
  source 1..133: mol_type = other RNA
gtcaccaggaacatgtacctggttttagagctagaaatagcaagttaaaataaggctagtccgttatcaacttgaaaaagtggcaccgagtcggtgcttcccccaggtgtacatgttcctgattctccctggg

SEQ ID NO: 4992 - RNA, 133 nt, synthetic construct
  source 1..133: mol_type = other RNA
gtcaccaggaacatgtacctggttttagagctagaaatagcaagttaaaataaggctagtccgttatcaacttgaaaaagtggcaccgagtcggtgcttcccccaggtgtacatgttcctgaagagtacctgg

SEQ ID NO: 4993 - RNA, 133 nt, synthetic construct
  source 1..133: mol_type = other RNA
gtcaccaggaacatgtacctggttttagagctagaaatagcaagttaaaataaggctagtccgttatcaacttgaaaaagtggcaccgagtcggtgcttcccccaggtgtacatgttcctgagaagtacctgg

SEQ ID NO: 4994 - RNA, 132 nt, synthetic construct
  source 1..132: mol_type = other RNA
gtcaccaggaacatgtacctggttttagagctagaaatagcaagttaaaataaggctagtccgttatcaacttgaaaaagtggcaccgagtcggtgcttcccccaggtgtacatgttcctgaagaccacctg

SEQ ID NO: 4995 - RNA, 133 nt, synthetic construct
  source 1..133: mol_type = other RNA
gtcaccaggaacatgtacctggttttagagctagaaatagcaagttaaaataaggctagtccgttatcaacttgaaaaagtggcaccgagtcggtgcttcccccaggtgtacatgttcctgagtcatcacctg

SEQ ID NO: 4996 - RNA, 131 nt, synthetic construct
  source 1..131: mol_type = other RNA
gtcaccaggaacatgtacctggttttagagctagaaatagcaagttaaaataaggctagtccgttatcaacttgaaaaagtggcaccgagtcggtgcttcccccaggtgtacatgttcctgaaacacacct

SEQ ID NO: 4997 - RNA, 132 nt, synthetic construct
  source 1..132: mol_type = other RNA
gtcaccaggaacatgtacctggttttagagctagaaatagcaagttaaaataaggctagtccgttatcaacttgaaaaagtggcaccgagtcggtgcttcccccaggtgtacatgttcctgattacacacct

SEQ ID NO: 4998 - RNA, 133 nt, synthetic construct
  source 1..133: mol_type = other RNA
gtcaccaggaacatgtacctggttttagagctagaaatagcaagttaaaataaggctagtccgttatcaacttgaaaaagtggcaccgagtcggtgcttcccccaggtgtacatgttcctgtcttcatacacc

SEQ ID NO: 4999 - RNA, 133 nt, synthetic construct
  source 1..133: mol_type = other RNA
gtcaccaggaacatgtacctggttttagagctagaaatagcaagttaaaataaggctagtccgttatcaacttgaaaaagtggcaccgagtcggtgcttcccccaggtgtacatgttcctgtagtcatacacc

SEQ ID NO: 5000 - RNA, 132 nt, synthetic construct
  source 1..132: mol_type = other RNA
gtcaccaggaacatgtacctggttttagagctagaaatagcaagttaaaataaggctagtccgttatcaacttgaaaaagtggcaccgagtcggtgcttcccccaggtgtacatgttcctgatgaagtacac

SEQ ID NO: 5001 - RNA, 133 nt, synthetic construct
  source 1..133: mol_type = other RNA
gtcaccaggaacatgtacctggttttagagctagaaatagcaagttaaaataaggctagtccgttatcaacttgaaaaagtggcaccgagtcggtgcttcccccaggtgtacatgttcctgattgaggtacac

SEQ ID NO: 5002 - RNA, 129 nt, synthetic construct
  source 1..129: mol_type = other RNA
gtcaccaggaacatgtacctggttttagagctagaaatagcaagttaaaataaggctagtccgttatcaacttgaaaaagtggcaccgagtcggtgcttcccccaggtgtacatgttcctgtctgtaca

SEQ ID NO: 5003 - RNA, 133 nt, synthetic construct
  source 1..133: mol_type = other RNA
gtcaccaggaacatgtacctggttttagagctagaaatagcaagttaaaataaggctagtccgttatcaacttgaaaaagtggcaccgagtcggtgcttcccccaggtgtacatgttcctgctgttctgtaca

SEQ ID NO: 5004 - RNA, 133 nt, synthetic construct
  source 1..133: mol_type = other RNA
gtcaccaggaacatgtacctggttttagagctagaaatagcaagttaaaataaggctagtccgttatcaacttgaaaaagtggcaccgagtcggtgcttcccccaggtgtacatgttcctgatacgtatgtac

SEQ ID NO: 5005 - RNA, 133 nt, synthetic construct
  source 1..133: mol_type = other RNA
gtcaccaggaacatgtacctggttttagagctagaaatagcaagttaaaataaggctagtccgttatcaacttgaaaaagtggcaccgagtcggtgcttcccccaggtgtacatgttcctgagtcgtatgtac

SEQ ID NO: 5006 - RNA, 133 nt, synthetic construct
  source 1..133: mol_type = other RNA
gtcaccaggaacatgtacctggttttagagctagaaatagcaagttaaaataaggctagtccgttatcaacttgaaaaagtggcaccgagtcggtgcttcccccaggtgtacatgttcctgttaacacatgta

SEQ ID NO: 5007 - RNA, 133 nt, synthetic construct
  source 1..133: mol_type = other RNA
gtcaccaggaacatgtacctggttttagagctagaaatagcaagttaaaataaggctagtccgttatcaacttgaaaaagtggcaccgagtcggtgcttcccccaggtgtacatgttcctgcaaccacatgta

SEQ ID NO: 5008 - RNA, 133 nt, synthetic construct
  source 1..133: mol_type = other RNA
gtcaccaggaacatgtacctggttttagagctagaaatagcaagttaaaataaggctagtccgttatcaacttgaaaaagtggcaccgagtcggtgcttcccccaggtgtacatgttcctgcccagcacatgt

SEQ ID NO: 5009 - RNA, 133 nt, synthetic construct
  source 1..133: mol_type = other RNA
gtcaccaggaacatgtacctggttttagagctagaaatagcaagttaaaataaggctagtccgttatcaacttgaaaaagtggcaccgagtcggtgcttcccccaggtgtacatgttcctgcctagcacatgt

SEQ ID NO: 5010 - RNA, 133 nt, synthetic construct
  source 1..133: mol_type = other RNA
gtcaccaggaacatgtacctggttttagagctagaaatagcaagttaaaataaggctagtccgttatcaacttgaaaaagtggcaccgagtcggtgcttcccccaggtgtacatgttcctgtcagcaaacatg

SEQ ID NO: 5011 - RNA, 133 nt, synthetic construct
  source 1..133: mol_type = other RNA
gtcaccaggaacatgtacctggttttagagctagaaatagcaagttaaaataaggctagtccgttatcaacttgaaaaagtggcaccgagtcggtgcttcccccaggtgtacatgttcctgattacaaacatg

SEQ ID NO: 5012 - RNA, 133 nt, synthetic construct
  source 1..133: mol_type = other RNA
gtcaccaggaacatgtacctggttttagagctagaaatagcaagttaaaataaggctagtccgttatcaacttgaaaaagtggcaccgagtcggtgcttcccccaggtgtacatgttcctgcaatcagaacat

SEQ ID NO: 5013 - RNA, 133 nt, synthetic construct
  source 1..133: mol_type = other RNA
gtcaccaggaacatgtacctggttttagagctagaaatagcaagttaaaataaggctagtccgttatcaacttgaaaaagtggcaccgagtcggtgcttcccccaggtgtacatgttcctgctatcagaacat

SEQ ID NO: 5014 - RNA, 130 nt, synthetic construct
  source 1..130: mol_type = other RNA
gtcaccaggaacatgtacctggttttagagctagaaatagcaagttaaaataaggctagtccgttatcaacttgaaaaagtggcaccgagtcggtgcttcccccaggtgtacatgttcctgataggaaca

SEQ ID NO: 5015 - RNA, 130 nt, synthetic construct
  source 1..130: mol_type = other RNA
gtcaccaggaacatgtacctggttttagagctagaaatagcaagttaaaataaggctagtccgttatcaacttgaaaaagtggcaccgagtcggtgcttcccccaggtgtacatgttcctgcaaggaaca

SEQ ID NO: 5016 - RNA, 131 nt, synthetic construct
  source 1..131: mol_type = other RNA
gtcaccaggaacatgtacctggttttagagctagaaatagcaagttaaaataaggctagtccgttatcaacttgaaaaagtggcaccgagtcggtgcttcccccaggtgtacatgttcctgttctaggaac

SEQ ID NO: 5017 - RNA, 131 nt, synthetic construct
  source 1..131: mol_type = other RNA
gtcaccaggaacatgtacctggttttagagctagaaatagcaagttaaaataaggctagtccgttatcaacttgaaaaagtggcaccgagtcggtgcttcccccaggtgtacatgttcctgtagtaggaac

SEQ ID NO: 5018 - RNA, 132 nt, synthetic construct
  source 1..132: mol_type = other RNA
gtcaccaggaacatgtacctggttttagagctagaaatagcaagttaaaataaggctagtccgttatcaacttgaaaaagtggcaccgagtcggtgcttcccccaggtgtacatgttcctgtagaacaggaa

SEQ ID NO: 5019 - RNA, 132 nt, synthetic construct
  source 1..132: mol_type = other RNA
gtcaccaggaacatgtacctggttttagagctagaaatagcaagttaaaataaggctagtccgttatcaacttgaaaaagtggcaccgagtcggtgcttcccccaggtgtacatgttcctgtaaaacaggaa

SEQ ID NO: 5020 - RNA, 134 nt, synthetic construct
  source 1..134: mol_type = other RNA
gtcaccaggaacatgtacctggttttagagctagaaatagcaagttaaaataaggctagtccgttatcaacttgaaaaagtggcaccgagtcggtgcttcccccaggtgtacatgttcctgagtcatgggggaa

SEQ ID NO: 5021 - RNA, 134 nt, synthetic construct
  source 1..134: mol_type = other RNA
gtcaccaggaacatgtacctggttttagagctagaaatagcaagttaaaataaggctagtccgttatcaacttgaaaaagtggcaccgagtcggtgcttcccccaggtgtacatgttcctgaggggtgggggaa

SEQ ID NO: 5022 - RNA, 132 nt, synthetic construct
  source 1..132: mol_type = other RNA
gtcaccaggaacatgtacctggttttagagctagaaatagcaagttaaaataaggctagtccgttatcaacttgaaaaagtggcaccgagtcggtgcttcccccaggtgtacatgttcctgagtctggggga

SEQ ID NO: 5023 - RNA, 135 nt, synthetic construct
  source 1..135: mol_type = other RNA
gtcaccaggaacatgtacctggttttagagctagaaatagcaagttaaaataaggctagtccgttatcaacttgaaaaagtggcaccgagtcggtgcttcccccaggtgtacatgttcctgagaagtctggggga

SEQ ID NO: 5024 - RNA, 135 nt, synthetic construct
  source 1..135: mol_type = other RNA
gtcaccaggaacatgtacctggttttagagctagaaatagcaagttaaaataaggctagtccgttatcaacttgaaaaagtggcaccgagtcggtgcttcccccaggtgtacatgttcctgatcttccctggggg

SEQ ID NO: 5025 - RNA, 135 nt, synthetic construct
  source 1..135: mol_type = other RNA
gtcaccaggaacatgtacctggttttagagctagaaatagcaagttaaaataaggctagtccgttatcaacttgaaaaagtggcaccgagtcggtgcttcccccaggtgtacatgttcctgatcctccctggggg

SEQ ID NO: 5026 - RNA, 135 nt, synthetic construct
  source 1..135: mol_type = other RNA
gtcaccaggaacatgtacctggttttagagctagaaatagcaagttaaaataaggctagtccgttatcaacttgaaaaagtggcaccgagtcggtgcttcccccaggtgtacatgttcctgaagagtacctgggg

SEQ ID NO: 5027 - RNA, 135 nt, synthetic construct
  source 1..135: mol_type = other RNA
gtcaccaggaacatgtacctggttttagagctagaaatagcaagttaaaataaggctagtccgttatcaacttgaaaaagtggcaccgagtcggtgcttcccccaggtgtacatgttcctgagaagtacctgggg

SEQ ID NO: 5028 - RNA, 134 nt, synthetic construct
  source 1..134: mol_type = other RNA
gtcaccaggaacatgtacctggttttagagctagaaatagcaagttaaaataaggctagtccgttatcaacttgaaaaagtggcaccgagtcggtgcttcccccaggtgtacatgttcctgaagaccacctggg

SEQ ID NO: 5029 - RNA, 135 nt, synthetic construct
  source 1..135: mol_type = other RNA
gtcaccaggaacatgtacctggttttagagctagaaatagcaagttaaaataaggctagtccgttatcaacttgaaaaagtggcaccgagtcggtgcttcccccaggtgtacatgttcctgtctcatcacctggg

SEQ ID NO: 5030 - RNA, 133 nt, synthetic construct
  source 1..133: mol_type = other RNA
gtcaccaggaacatgtacctggttttagagctagaaatagcaagttaaaataaggctagtccgttatcaacttgaaaaagtggcaccgagtcggtgcttcccccaggtgtacatgttcctgaaacacacctgg

SEQ ID NO: 5031 - RNA, 134 nt, synthetic construct
  source 1..134: mol_type = other RNA
gtcaccaggaacatgtacctggttttagagctagaaatagcaagttaaaataaggctagtccgttatcaacttgaaaaagtggcaccgagtcggtgcttcccccaggtgtacatgttcctgattacacacctgg

SEQ ID NO: 5032 - RNA, 135 nt, synthetic construct
  source 1..135: mol_type = other RNA
gtcaccaggaacatgtacctggttttagagctagaaatagcaagttaaaataaggctagtccgttatcaacttgaaaaagtggcaccgagtcggtgcttcccccaggtgtacatgttcctgagtaactacacctg

SEQ ID NO: 5033 - RNA, 133 nt, synthetic construct
  source 1..133: mol_type = other RNA
gtcaccaggaacatgtacctggttttagagctagaaatagcaagttaaaataaggctagtccgttatcaacttgaaaaagtggcaccgagtcggtgcttcccccaggtgtacatgttcctgttactacacctg

SEQ ID NO: 5034 - RNA, 135 nt, synthetic construct
  source 1..135: mol_type = other RNA
gtcaccaggaacatgtacctggttttagagctagaaatagcaagttaaaataaggctagtccgttatcaacttgaaaaagtggcaccgagtcggtgcttcccccaggtgtacatgttcctgattgaggtacacct

SEQ ID NO: 5035 - RNA, 135 nt, synthetic construct
  source 1..135: mol_type = other RNA
gtcaccaggaacatgtacctggttttagagctagaaatagcaagttaaaataaggctagtccgttatcaacttgaaaaagtggcaccgagtcggtgcttcccccaggtgtacatgttcctgagtgaggtacacct

SEQ ID NO: 5036 - RNA, 135 nt, synthetic construct
  source 1..135: mol_type = other RNA
gtcaccaggaacatgtacctggttttagagctagaaatagcaagttaaaataaggctagtccgttatcaacttgaaaaagtggcaccgagtcggtgcttcccccaggtgtacatgttcctgctgttctgtacacc

SEQ ID NO: 5037 - RNA, 135 nt, synthetic construct
  source 1..135: mol_type = other RNA
gtcaccaggaacatgtacctggttttagagctagaaatagcaagttaaaataaggctagtccgttatcaacttgaaaaagtggcaccgagtcggtgcttcccccaggtgtacatgttcctgttgttctgtacacc

SEQ ID NO: 5038 - RNA, 135 nt, synthetic construct
  source 1..135: mol_type = other RNA
gtcaccaggaacatgtacctggttttagagctagaaatagcaagttaaaataaggctagtccgttatcaacttgaaaaagtggcaccgagtcggtgcttcccccaggtgtacatgttcctgtctagtatgtacac

SEQ ID NO: 5039 - RNA, 135 nt, synthetic construct
  source 1..135: mol_type = other RNA
gtcaccaggaacatgtacctggttttagagctagaaatagcaagttaaaataaggctagtccgttatcaacttgaaaaagtggcaccgagtcggtgcttcccccaggtgtacatgttcctgattcgtatgtacac

SEQ ID NO: 5040 - RNA, 135 nt, synthetic construct
  source 1..135: mol_type = other RNA
gtcaccaggaacatgtacctggttttagagctagaaatagcaagttaaaataaggctagtccgttatcaacttgaaaaagtggcaccgagtcggtgcttcccccaggtgtacatgttcctgaccacacatgtaca

SEQ ID NO: 5041 - RNA, 135 nt, synthetic construct
  source 1..135: mol_type = other RNA
gtcaccaggaacatgtacctggttttagagctagaaatagcaagttaaaataaggctagtccgttatcaacttgaaaaagtggcaccgagtcggtgcttcccccaggtgtacatgttcctgaactcacatgtaca

SEQ ID NO: 5042 - RNA, 135 nt, synthetic construct
  source 1..135: mol_type = other RNA
gtcaccaggaacatgtacctggttttagagctagaaatagcaagttaaaataaggctagtccgttatcaacttgaaaaagtggcaccgagtcggtgcttcccccaggtgtacatgttcctgccatgcacatgtac

SEQ ID NO: 5043 - RNA, 135 nt, synthetic construct
  source 1..135: mol_type = other RNA
gtcaccaggaacatgtacctggttttagagctagaaatagcaagttaaaataaggctagtccgttatcaacttgaaaaagtggcaccgagtcggtgcttcccccaggtgtacatgttcctgcgatgcacatgtac

SEQ ID NO: 5044 - RNA, 135 nt, synthetic construct
  source 1..135: mol_type = other RNA
gtcaccaggaacatgtacctggttttagagctagaaatagcaagttaaaataaggctagtccgttatcaacttgaaaaagtggcaccgagtcggtgcttcccccaggtgtacatgttcctgatgacaaacatgta

SEQ ID NO: 5045 - RNA, 135 nt, synthetic construct
  source 1..135: mol_type = other RNA
gtcaccaggaacatgtacctggttttagagctagaaatagcaagttaaaataaggctagtccgttatcaacttgaaaaagtggcaccgagtcggtgcttcccccaggtgtacatgttcctgatcacaaacatgta

SEQ ID NO: 5046 - RNA, 135 nt, synthetic construct
  source 1..135: mol_type = other RNA
gtcaccaggaacatgtacctggttttagagctagaaatagcaagttaaaataaggctagtccgttatcaacttgaaaaagtggcaccgagtcggtgcttcccccaggtgtacatgttcctgtcattagaacatgt

SEQ ID NO: 5047 - RNA, 135 nt, synthetic construct
  source 1..135: mol_type = other RNA
gtcaccaggaacatgtacctggttttagagctagaaatagcaagttaaaataaggctagtccgttatcaacttgaaaaagtggcaccgagtcggtgcttcccccaggtgtacatgttcctgtacttagaacatgt

SEQ ID NO: 5048 - RNA, 132 nt, synthetic construct
  source 1..132: mol_type = other RNA
gtcaccaggaacatgtacctggttttagagctagaaatagcaagttaaaataaggctagtccgttatcaacttgaaaaagtggcaccgagtcggtgcttcccccaggtgtacatgttcctgtcgggaacatg

SEQ ID NO: 5049 - RNA, 132 nt, synthetic construct
  source 1..132: mol_type = other RNA
gtcaccaggaacatgtacctggttttagagctagaaatagcaagttaaaataaggctagtccgttatcaacttgaaaaagtggcaccgagtcggtgcttcccccaggtgtacatgttcctgcaaggaacatg

SEQ ID NO: 5050 - RNA, 135 nt, synthetic construct
  source 1..135: mol_type = other RNA
gtcaccaggaacatgtacctggttttagagctagaaatagcaagttaaaataaggctagtccgttatcaacttgaaaaagtggcaccgagtcggtgcttcccccaggtgtacatgttcctgattgataggaacat

SEQ ID NO: 5051 - RNA, 133 nt, synthetic construct
  source 1..133: mol_type = other RNA
gtcaccaggaacatgtacctggttttagagctagaaatagcaagttaaaataaggctagtccgttatcaacttgaaaaagtggcaccgagtcggtgcttcccccaggtgtacatgttcctgaaataggaacat

SEQ ID NO: 5052 - RNA, 134 nt, synthetic construct
  source 1..134: mol_type = other RNA
gtcaccaggaacatgtacctggttttagagctagaaatagcaagttaaaataaggctagtccgttatcaacttgaaaaagtggcaccgagtcggtgcttcccccaggtgtacatgttcctgtcacacaggaaca

SEQ ID NO: 5053 - RNA, 134 nt, synthetic construct
  source 1..134: mol_type = other RNA
gtcaccaggaacatgtacctggttttagagctagaaatagcaagttaaaataaggctagtccgttatcaacttgaaaaagtggcaccgagtcggtgcttcccccaggtgtacatgttcctgtcgaacaggaaca

SEQ ID NO: 5054 - RNA, 115 nt, synthetic construct
  source 1..115: mol_type = other RNA
gtcaccaggaacatgtacctggttttagagctagaaatagcaagttaaaataaggctagtccgttatcaacttgaaaaagtggcaccgagtcggtgcttcccccaggtgtacatg

SEQ ID NO: 5055 - RNA, 124 nt, synthetic construct
  source 1..124: mol_type = other RNA
gtcaccaggaacatgtacctggttttagagctagaaatagcaagttaaaataaggctagtccgttatcaacttgaaaaagtggcaccgagtcggtgcttcccccaggtgtacatgaagacggaa

SEQ ID NO: 5056 - RNA, 125 nt, synthetic construct
  source 1..125: mol_type = other RNA
gtcaccaggaacatgtacctggttttagagctagaaatagcaagttaaaataaggctagtccgttatcaacttgaaaaagtggcaccgagtcggtgcttcccccaggtgtacatgagttcaggaa

SEQ ID NO: 5057 - RNA, 125 nt, synthetic construct
  source 1..125: mol_type = other RNA
gtcaccaggaacatgtacctggttttagagctagaaatagcaagttaaaataaggctagtccgttatcaacttgaaaaagtggcaccgagtcggtgcttcccccaggtgtacatgaagtcaggga

SEQ ID NO: 5058 - RNA, 124 nt, synthetic construct
  source 1..124: mol_type = other RNA
gtcaccaggaacatgtacctggttttagagctagaaatagcaagttaaaataaggctagtccgttatcaacttgaaaaagtggcaccgagtcggtgcttcccccaggtgtacatgaagtaggga

SEQ ID NO: 5059 - RNA, 125 nt, synthetic construct
  source 1..125: mol_type = other RNA
gtcaccaggaacatgtacctggttttagagctagaaatagcaagttaaaataaggctagtccgttatcaacttgaaaaagtggcaccgagtcggtgcttcccccaggtgtacatgtaaacggggg

SEQ ID NO: 5060 - RNA, 125 nt, synthetic construct
  source 1..125: mol_type = other RNA
gtcaccaggaacatgtacctggttttagagctagaaatagcaagttaaaataaggctagtccgttatcaacttgaaaaagtggcaccgagtcggtgcttcccccaggtgtacatgagagaggggg

SEQ ID NO: 5061 - RNA, 125 nt, synthetic construct
  source 1..125: mol_type = other RNA
gtcaccaggaacatgtacctggttttagagctagaaatagcaagttaaaataaggctagtccgttatcaacttgaaaaagtggcaccgagtcggtgcttcccccaggtgtacatgtaagacgggg

SEQ ID NO: 5062 - RNA, 125 nt, synthetic construct
  source 1..125: mol_type = other RNA
gtcaccaggaacatgtacctggttttagagctagaaatagcaagttaaaataaggctagtccgttatcaacttgaaaaagtggcaccgagtcggtgcttcccccaggtgtacatgaaggacgggg

SEQ ID NO: 5063 - RNA, 124 nt, synthetic construct
  source 1..124: mol_type = other RNA
gtcaccaggaacatgtacctggttttagagctagaaatagcaagttaaaataaggctagtccgttatcaacttgaaaaagtggcaccgagtcggtgcttcccccaggtgtacatgaagtgtggg

SEQ ID NO: 5064 - RNA, 124 nt, synthetic construct
  source 1..124: mol_type = other RNA
gtcaccaggaacatgtacctggttttagagctagaaatagcaagttaaaataaggctagtccgttatcaacttgaaaaagtggcaccgagtcggtgcttcccccaggtgtacatgtagtgtggg

SEQ ID NO: 5065 - RNA, 125 nt, synthetic construct
  source 1..125: mol_type = other RNA
gtcaccaggaacatgtacctggttttagagctagaaatagcaagttaaaataaggctagtccgttatcaacttgaaaaagtggcaccgagtcggtgcttcccccaggtgtacatgaatggtctgg

SEQ ID NO: 5066 - RNA, 125 nt, synthetic construct
  source 1..125: mol_type = other RNA
gtcaccaggaacatgtacctggttttagagctagaaatagcaagttaaaataaggctagtccgttatcaacttgaaaaagtggcaccgagtcggtgcttcccccaggtgtacatgatgagtctgg

SEQ ID NO: 5067 - RNA, 125 nt, synthetic construct
  source 1..125: mol_type = other RNA
gtcaccaggaacatgtacctggttttagagctagaaatagcaagttaaaataaggctagtccgttatcaacttgaaaaagtggcaccgagtcggtgcttcccccaggtgtacatgatcctccctg

SEQ ID NO: 5068 - RNA, 125 nt, synthetic construct
  source 1..125: mol_type = other RNA
gtcaccaggaacatgtacctggttttagagctagaaatagcaagttaaaataaggctagtccgttatcaacttgaaaaagtggcaccgagtcggtgcttcccccaggtgtacatgtatctccctg

SEQ ID NO: 5069 - RNA, 125 nt, synthetic construct
  source 1..125: mol_type = other RNA
gtcaccaggaacatgtacctggttttagagctagaaatagcaagttaaaataaggctagtccgttatcaacttgaaaaagtggcaccgagtcggtgcttcccccaggtgtacatgccctctacct

SEQ ID NO: 5070 - RNA, 125 nt, synthetic construct
  source 1..125: mol_type = other RNA
gtcaccaggaacatgtacctggttttagagctagaaatagcaagttaaaataaggctagtccgttatcaacttgaaaaagtggcaccgagtcggtgcttcccccaggtgtacatgtctcctacct

SEQ ID NO: 5071 - RNA, 125 nt, synthetic construct
  source 1..125: mol_type = other RNA
gtcaccaggaacatgtacctggttttagagctagaaatagcaagttaaaataaggctagtccgttatcaacttgaaaaagtggcaccgagtcggtgcttcccccaggtgtacatgtgcccacacc

SEQ ID NO: 5072 - RNA, 125 nt, synthetic construct
  source 1..125: mol_type = other RNA
gtcaccaggaacatgtacctggttttagagctagaaatagcaagttaaaataaggctagtccgttatcaacttgaaaaagtggcaccgagtcggtgcttcccccaggtgtacatgatcacacacc

SEQ ID NO: 5073 - RNA, 125 nt, synthetic construct
  source 1..125: mol_type = other RNA
gtcaccaggaacatgtacctggttttagagctagaaatagcaagttaaaataaggctagtccgttatcaacttgaaaaagtggcaccgagtcggtgcttcccccaggtgtacatggaacccacac

SEQ ID NO: 5074 - RNA, 125 nt, synthetic construct
  source 1..125: mol_type = other RNA
gtcaccaggaacatgtacctggttttagagctagaaatagcaagttaaaataaggctagtccgttatcaacttgaaaaagtggcaccgagtcggtgcttcccccaggtgtacatggtatccacac

SEQ ID NO: 5075 - RNA, 125 nt, synthetic construct
  source 1..125: mol_type = other RNA
gtcaccaggaacatgtacctggttttagagctagaaatagcaagttaaaataaggctagtccgttatcaacttgaaaaagtggcaccgagtcggtgcttcccccaggtgtacatgctgtcataca

SEQ ID NO: 5076 - RNA, 125 nt, synthetic construct
  source 1..125: mol_type = other RNA
gtcaccaggaacatgtacctggttttagagctagaaatagcaagttaaaataaggctagtccgttatcaacttgaaaaagtggcaccgagtcggtgcttcccccaggtgtacatgttcccataca

SEQ ID NO: 5077 - RNA, 125 nt, synthetic construct
  source 1..125: mol_type = other RNA
gtcaccaggaacatgtacctggttttagagctagaaatagcaagttaaaataaggctagtccgttatcaacttgaaaaagtggcaccgagtcggtgcttcccccaggtgtacatgtgtccggtac

SEQ ID NO: 5078 - RNA, 125 nt, synthetic construct
  source 1..125: mol_type = other RNA
gtcaccaggaacatgtacctggttttagagctagaaatagcaagttaaaataaggctagtccgttatcaacttgaaaaagtggcaccgagtcggtgcttcccccaggtgtacatgtctccggtac

SEQ ID NO: 5079 - RNA, 125 nt, synthetic construct
  source 1..125: mol_type = other RNA
gtcaccaggaacatgtacctggttttagagctagaaatagcaagttaaaataaggctagtccgttatcaacttgaaaaagtggcaccgagtcggtgcttcccccaggtgtacatgtcttgctgta

SEQ ID NO: 5080 - RNA, 125 nt, synthetic construct
  source 1..125: mol_type = other RNA
gtcaccaggaacatgtacctggttttagagctagaaatagcaagttaaaataaggctagtccgttatcaacttgaaaaagtggcaccgagtcggtgcttcccccaggtgtacatgttaggctgta

SEQ ID NO: 5081 - RNA, 125 nt, synthetic construct
  source 1..125: mol_type = other RNA
gtcaccaggaacatgtacctggttttagagctagaaatagcaagttaaaataaggctagtccgttatcaacttgaaaaagtggcaccgagtcggtgcttcccccaggtgtacatgaaatatatgt

SEQ ID NO: 5082 - RNA, 125 nt, synthetic construct
  source 1..125: mol_type = other RNA
gtcaccaggaacatgtacctggttttagagctagaaatagcaagttaaaataaggctagtccgttatcaacttgaaaaagtggcaccgagtcggtgcttcccccaggtgtacatgatccatatgt

SEQ ID NO: 5083 - RNA, 125 nt, synthetic construct
  source 1..125: mol_type = other RNA
gtcaccaggaacatgtacctggttttagagctagaaatagcaagttaaaataaggctagtccgttatcaacttgaaaaagtggcaccgagtcggtgcttcccccaggtgtacatggttactcatg

SEQ ID NO: 5084 - RNA, 125 nt, synthetic construct
  source 1..125: mol_type = other RNA
gtcaccaggaacatgtacctggttttagagctagaaatagcaagttaaaataaggctagtccgttatcaacttgaaaaagtggcaccgagtcggtgcttcccccaggtgtacatggattgtcatg

SEQ ID NO: 5085 - RNA, 126 nt, synthetic construct
  source 1..126: mol_type = other RNA
gtcaccaggaacatgtacctggttttagagctagaaatagcaagttaaaataaggctagtccgttatcaacttgaaaaagtggcaccgagtcggtgcttcccccaggtgtacatggtaacggggaa

SEQ ID NO: 5086 - RNA, 127 nt, synthetic construct
  source 1..127: mol_type = other RNA
gtcaccaggaacatgtacctggttttagagctagaaatagcaagttaaaataaggctagtccgttatcaacttgaaaaagtggcaccgagtcggtgcttcccccaggtgtacatggtagtcggggaa

SEQ ID NO: 5087 - RNA, 127 nt, synthetic construct
  source 1..127: mol_type = other RNA
gtcaccaggaacatgtacctggttttagagctagaaatagcaagttaaaataaggctagtccgttatcaacttgaaaaagtggcaccgagtcggtgcttcccccaggtgtacatgaaggtcggggga

SEQ ID NO: 5088 - RNA, 127 nt, synthetic construct
  source 1..127: mol_type = other RNA
gtcaccaggaacatgtacctggttttagagctagaaatagcaagttaaaataaggctagtccgttatcaacttgaaaaagtggcaccgagtcggtgcttcccccaggtgtacatgaaagacggggga

SEQ ID NO: 5089 - RNA, 126 nt, synthetic construct
  source 1..126: mol_type = other RNA
gtcaccaggaacatgtacctggttttagagctagaaatagcaagttaaaataaggctagtccgttatcaacttgaaaaagtggcaccgagtcggtgcttcccccaggtgtacatgtggtgtggggg

SEQ ID NO: 5090 - RNA, 126 nt, synthetic construct
  source 1..126: mol_type = other RNA
gtcaccaggaacatgtacctggttttagagctagaaatagcaagttaaaataaggctagtccgttatcaacttgaaaaagtggcaccgagtcggtgcttcccccaggtgtacatgaagtgtggggg

SEQ ID NO: 5091 - RNA, 127 nt, synthetic construct
  source 1..127: mol_type = other RNA
gtcaccaggaacatgtacctggttttagagctagaaatagcaagttaaaataaggctagtccgttatcaacttgaaaaagtggcaccgagtcggtgcttcccccaggtgtacatgtgaagtctgggg

SEQ ID NO: 5092 - RNA, 127 nt, synthetic construct
  source 1..127: mol_type = other RNA
gtcaccaggaacatgtacctggttttagagctagaaatagcaagttaaaataaggctagtccgttatcaacttgaaaaagtggcaccgagtcggtgcttcccccaggtgtacatgtctggtctgggg

SEQ ID NO: 5093 - RNA, 127 nt, synthetic construct
  source 1..127: mol_type = other RNA
gtcaccaggaacatgtacctggttttagagctagaaatagcaagttaaaataaggctagtccgttatcaacttgaaaaagtggcaccgagtcggtgcttcccccaggtgtacatgatcctccctggg

SEQ ID NO: 5094 - RNA, 127 nt, synthetic construct
  source 1..127: mol_type = other RNA
gtcaccaggaacatgtacctggttttagagctagaaatagcaagttaaaataaggctagtccgttatcaacttgaaaaagtggcaccgagtcggtgcttcccccaggtgtacatgctcctccctggg

SEQ ID NO: 5095 - RNA, 127 nt, synthetic construct
  source 1..127: mol_type = other RNA
gtcaccaggaacatgtacctggttttagagctagaaatagcaagttaaaataaggctagtccgttatcaacttgaaaaagtggcaccgagtcggtgcttcccccaggtgtacatgtgaagtacctgg

SEQ ID NO: 5096 - RNA, 127 nt, synthetic construct
  source 1..127: mol_type = other RNA
gtcaccaggaacatgtacctggttttagagctagaaatagcaagttaaaataaggctagtccgttatcaacttgaaaaagtggcaccgagtcggtgcttcccccaggtgtacatgcccagtacctgg

SEQ ID NO: 5097 - RNA, 127 nt, synthetic construct
  source 1..127: mol_type = other RNA
gtcaccaggaacatgtacctggttttagagctagaaatagcaagttaaaataaggctagtccgttatcaacttgaaaaagtggcaccgagtcggtgcttcccccaggtgtacatggtatcacacctg

SEQ ID NO: 5098 - RNA, 127 nt, synthetic construct
  source 1..127: mol_type = other RNA
gtcaccaggaacatgtacctggttttagagctagaaatagcaagttaaaataaggctagtccgttatcaacttgaaaaagtggcaccgagtcggtgcttcccccaggtgtacatggtctcacacctg

SEQ ID NO: 5099 - RNA, 127 nt, synthetic construct
  source 1..127: mol_type = other RNA
gtcaccaggaacatgtacctggttttagagctagaaatagcaagttaaaataaggctagtccgttatcaacttgaaaaagtggcaccgagtcggtgcttcccccaggtgtacatggatgccacacct

SEQ ID NO: 5100 - RNA, 127 nt, synthetic construct
  source 1..127: mol_type = other RNA
gtcaccaggaacatgtacctggttttagagctagaaatagcaagttaaaataaggctagtccgttatcaacttgaaaaagtggcaccgagtcggtgcttcccccaggtgtacatggaatccacacct

SEQ ID NO: 5101 - RNA, 127 nt, synthetic construct
  source 1..127: mol_type = other RNA
gtcaccaggaacatgtacctggttttagagctagaaatagcaagttaaaataaggctagtccgttatcaacttgaaaaagtggcaccgagtcggtgcttcccccaggtgtacatgtgtccatacacc

SEQ ID NO: 5102 - RNA, 127 nt, synthetic construct
  source 1..127: mol_type = other RNA
gtcaccaggaacatgtacctggttttagagctagaaatagcaagttaaaataaggctagtccgttatcaacttgaaaaagtggcaccgagtcggtgcttcccccaggtgtacatgtccccatacacc

SEQ ID NO: 5103 - RNA, 127 nt, synthetic construct
  source 1..127: mol_type = other RNA
gtcaccaggaacatgtacctggttttagagctagaaatagcaagttaaaataaggctagtccgttatcaacttgaaaaagtggcaccgagtcggtgcttcccccaggtgtacatgttaccggtacac

SEQ ID NO: 5104 - RNA, 127 nt, synthetic construct
  source 1..127: mol_type = other RNA
gtcaccaggaacatgtacctggttttagagctagaaatagcaagttaaaataaggctagtccgttatcaacttgaaaaagtggcaccgagtcggtgcttcccccaggtgtacatgtgcccggtacac

SEQ ID NO: 5105 - RNA, 127 nt, synthetic construct
  source 1..127: mol_type = other RNA
gtcaccaggaacatgtacctggttttagagctagaaatagcaagttaaaataaggctagtccgttatcaacttgaaaaagtggcaccgagtcggtgcttcccccaggtgtacatgtactgctgtaca

SEQ ID NO: 5106 - RNA, 127 nt, synthetic construct
  source 1..127: mol_type = other RNA
gtcaccaggaacatgtacctggttttagagctagaaatagcaagttaaaataaggctagtccgttatcaacttgaaaaagtggcaccgagtcggtgcttcccccaggtgtacatgtcgagctgtaca

SEQ ID NO: 5107 - RNA, 125 nt, synthetic construct
  source 1..125: mol_type = other RNA
gtcaccaggaacatgtacctggttttagagctagaaatagcaagttaaaataaggctagtccgttatcaacttgaaaaagtggcaccgagtcggtgcttcccccaggtgtacatggattatgtac

SEQ ID NO: 5108 - RNA, 125 nt, synthetic construct
  source 1..125: mol_type = other RNA
gtcaccaggaacatgtacctggttttagagctagaaatagcaagttaaaataaggctagtccgttatcaacttgaaaaagtggcaccgagtcggtgcttcccccaggtgtacatgtgttatgtac

SEQ ID NO: 5109 - RNA, 127 nt, synthetic construct
  source 1..127: mol_type = other RNA
gtcaccaggaacatgtacctggttttagagctagaaatagcaagttaaaataaggctagtccgttatcaacttgaaaaagtggcaccgagtcggtgcttcccccaggtgtacatggattgtcatgta

SEQ ID NO: 5110 - RNA, 127 nt, synthetic construct
  source 1..127: mol_type = other RNA
gtcaccaggaacatgtacctggttttagagctagaaatagcaagttaaaataaggctagtccgttatcaacttgaaaaagtggcaccgagtcggtgcttcccccaggtgtacatggagcgtcatgta

SEQ ID NO: 5111 - RNA, 128 nt, synthetic construct
  source 1..128: mol_type = other RNA
gtcaccaggaacatgtacctggttttagagctagaaatagcaagttaaaataaggctagtccgttatcaacttgaaaaagtggcaccgagtcggtgcttcccccaggtgtacatgtggtgtgggggaa

SEQ ID NO: 5112 - RNA, 128 nt, synthetic construct
  source 1..128: mol_type = other RNA
gtcaccaggaacatgtacctggttttagagctagaaatagcaagttaaaataaggctagtccgttatcaacttgaaaaagtggcaccgagtcggtgcttcccccaggtgtacatggagtgtgggggaa

SEQ ID NO: 5113 - RNA, 129 nt, synthetic construct
  source 1..129: mol_type = other RNA
gtcaccaggaacatgtacctggttttagagctagaaatagcaagttaaaataaggctagtccgttatcaacttgaaaaagtggcaccgagtcggtgcttcccccaggtgtacatgctgagtctggggga

SEQ ID NO: 5114 - RNA, 129 nt, synthetic construct
  source 1..129: mol_type = other RNA
gtcaccaggaacatgtacctggttttagagctagaaatagcaagttaaaataaggctagtccgttatcaacttgaaaaagtggcaccgagtcggtgcttcccccaggtgtacatgtaaagtctggggga

SEQ ID NO: 5115 - RNA, 129 nt, synthetic construct
  source 1..129: mol_type = other RNA
gtcaccaggaacatgtacctggttttagagctagaaatagcaagttaaaataaggctagtccgttatcaacttgaaaaagtggcaccgagtcggtgcttcccccaggtgtacatgatcttccctggggg

SEQ ID NO: 5116 - RNA, 129 nt, synthetic construct
  source 1..129: mol_type = other RNA
gtcaccaggaacatgtacctggttttagagctagaaatagcaagttaaaataaggctagtccgttatcaacttgaaaaagtggcaccgagtcggtgcttcccccaggtgtacatggaattccctggggg

SEQ ID NO: 5117 - RNA, 129 nt, synthetic construct
  source 1..129: mol_type = other RNA
gtcaccaggaacatgtacctggttttagagctagaaatagcaagttaaaataaggctagtccgttatcaacttgaaaaagtggcaccgagtcggtgcttcccccaggtgtacatgggacgtacctgggg

SEQ ID NO: 5118 - RNA, 129 nt, synthetic construct
  source 1..129: mol_type = other RNA
gtcaccaggaacatgtacctggttttagagctagaaatagcaagttaaaataaggctagtccgttatcaacttgaaaaagtggcaccgagtcggtgcttcccccaggtgtacatggaaagtacctgggg

SEQ ID NO: 5119 - RNA, 129 nt, synthetic construct
  source 1..129: mol_type = other RNA
gtcaccaggaacatgtacctggttttagagctagaaatagcaagttaaaataaggctagtccgttatcaacttgaaaaagtggcaccgagtcggtgcttcccccaggtgtacatgtggacacacctggg

SEQ ID NO: 5120 - RNA, 129 nt, synthetic construct
  source 1..129: mol_type = other RNA
gtcaccaggaacatgtacctggttttagagctagaaatagcaagttaaaataaggctagtccgttatcaacttgaaaaagtggcaccgagtcggtgcttcccccaggtgtacatgagaccacacctggg

SEQ ID NO: 5121 - RNA, 129 nt, synthetic construct
  source 1..129: mol_type = other RNA
gtcaccaggaacatgtacctggttttagagctagaaatagcaagttaaaataaggctagtccgttatcaacttgaaaaagtggcaccgagtcggtgcttcccccaggtgtacatggcggccacacctgg

SEQ ID NO: 5122 - RNA, 129 nt, synthetic construct
  source 1..129: mol_type = other RNA
gtcaccaggaacatgtacctggttttagagctagaaatagcaagttaaaataaggctagtccgttatcaacttgaaaaagtggcaccgagtcggtgcttcccccaggtgtacatggggcccacacctgg

SEQ ID NO: 5123 - RNA, 129 nt, synthetic construct
  source 1..129: mol_type = other RNA
gtcaccaggaacatgtacctggttttagagctagaaatagcaagttaaaataaggctagtccgttatcaacttgaaaaagtggcaccgagtcggtgcttcccccaggtgtacatgtgtccatacacctg

SEQ ID NO: 5124 - RNA, 129 nt, synthetic construct
  source 1..129: mol_type = other RNA
gtcaccaggaacatgtacctggttttagagctagaaatagcaagttaaaataaggctagtccgttatcaacttgaaaaagtggcaccgagtcggtgcttcccccaggtgtacatgtccccatacacctg

SEQ ID NO: 5125 - RNA, 129 nt, synthetic construct
  source 1..129: mol_type = other RNA
gtcaccaggaacatgtacctggttttagagctagaaatagcaagttaaaataaggctagtccgttatcaacttgaaaaagtggcaccgagtcggtgcttcccccaggtgtacatgtgcccggtacacct

SEQ ID NO: 5126 - RNA, 129 nt, synthetic construct
  source 1..129: mol_type = other RNA
gtcaccaggaacatgtacctggttttagagctagaaatagcaagttaaaataaggctagtccgttatcaacttgaaaaagtggcaccgagtcggtgcttcccccaggtgtacatgtctccggtacacct

SEQ ID NO: 5127 - RNA, 129 nt, synthetic construct
  source 1..129: mol_type = other RNA
gtcaccaggaacatgtacctggttttagagctagaaatagcaagttaaaataaggctagtccgttatcaacttgaaaaagtggcaccgagtcggtgcttcccccaggtgtacatgtgccgctgtacacc

SEQ ID NO: 5128 - RNA, 128 nt, synthetic construct
  source 1..128: mol_type = other RNA
gtcaccaggaacatgtacctggttttagagctagaaatagcaagttaaaataaggctagtccgttatcaacttgaaaaagtggcaccgagtcggtgcttcccccaggtgtacatggccgctgtacacc

SEQ ID NO: 5129 - RNA, 129 nt, synthetic construct
  source 1..129: mol_type = other RNA
gtcaccaggaacatgtacctggttttagagctagaaatagcaagttaaaataaggctagtccgttatcaacttgaaaaagtggcaccgagtcggtgcttcccccaggtgtacatgatacatatgtacac

SEQ ID NO: 5130 - RNA, 129 nt, synthetic construct
  source 1..129: mol_type = other RNA
gtcaccaggaacatgtacctggttttagagctagaaatagcaagttaaaataaggctagtccgttatcaacttgaaaaagtggcaccgagtcggtgcttcccccaggtgtacatgacagatatgtacac

SEQ ID NO: 5131 - RNA, 129 nt, synthetic construct
  source 1..129: mol_type = other RNA
gtcaccaggaacatgtacctggttttagagctagaaatagcaagttaaaataaggctagtccgttatcaacttgaaaaagtggcaccgagtcggtgcttcccccaggtgtacatggatggtcatgtaca

SEQ ID NO: 5132 - RNA, 129 nt, synthetic construct
  source 1..129: mol_type = other RNA
gtcaccaggaacatgtacctggttttagagctagaaatagcaagttaaaataaggctagtccgttatcaacttgaaaaagtggcaccgagtcggtgcttcccccaggtgtacatggtatctcatgtaca

SEQ ID NO: 5133 - RNA, 119 nt, synthetic construct
  source 1..119: mol_type = other RNA
ggcccagactgagcacgtgagttttagagctagaaatagcaagttaaaataaggctagtccgttatcaacttgaaaaagtggcaccgagtcggtgcttcctctggcatcacgtgctcag

SEQ ID NO: 5134 - RNA, 129 nt, synthetic construct
  source 1..129: mol_type = other RNA
ggcccagactgagcacgtgagttttagagctagaaatagcaagttaaaataaggctagtccgttatcaacttgaaaaagtggcaccgagtcggtgcttcctctggcatcacgtgctcagcgctgcggaa

SEQ ID NO: 5135 - RNA, 129 nt, synthetic construct
  source 1..129: mol_type = other RNA
ggcccagactgagcacgtgagttttagagctagaaatagcaagttaaaataaggctagtccgttatcaacttgaaaaagtggcaccgagtcggtgcttcctctggcatcacgtgctcagttgtgcggaa

SEQ ID NO: 5136 - RNA, 129 nt, synthetic construct
  source 1..129: mol_type = other RNA
ggcccagactgagcacgtgagttttagagctagaaatagcaagttaaaataaggctagtccgttatcaacttgaaaaagtggcaccgagtcggtgcttcctctggcatcacgtgctcagtgactaagga

SEQ ID NO: 5137 - RNA, 129 nt, synthetic construct
  source 1..129: mol_type = other RNA
ggcccagactgagcacgtgagttttagagctagaaatagcaagttaaaataaggctagtccgttatcaacttgaaaaagtggcaccgagtcggtgcttcctctggcatcacgtgctcagcgtgcaagga

SEQ ID NO: 5138 - RNA, 129 nt, synthetic construct
  source 1..129: mol_type = other RNA
ggcccagactgagcacgtgagttttagagctagaaatagcaagttaaaataaggctagtccgttatcaacttgaaaaagtggcaccgagtcggtgcttcctctggcatcacgtgctcagcattccgagg

SEQ ID NO: 5139 - RNA, 129 nt, synthetic construct
  source 1..129: mol_type = other RNA
ggcccagactgagcacgtgagttttagagctagaaatagcaagttaaaataaggctagtccgttatcaacttgaaaaagtggcaccgagtcggtgcttcctctggcatcacgtgctcagctcgctgagg

SEQ ID NO: 5140 - RNA, 129 nt, synthetic construct
  source 1..129: mol_type = other RNA
ggcccagactgagcacgtgagttttagagctagaaatagcaagttaaaataaggctagtccgttatcaacttgaaaaagtggcaccgagtcggtgcttcctctggcatcacgtgctcagcatcgtagag

SEQ ID NO: 5141 - RNA, 129 nt, synthetic construct
  source 1..129: mol_type = other RNA
ggcccagactgagcacgtgagttttagagctagaaatagcaagttaaaataaggctagtccgttatcaacttgaaaaagtggcaccgagtcggtgcttcctctggcatcacgtgctcagctacgtagag

SEQ ID NO: 5142 - RNA, 129 nt, synthetic construct
  source 1..129: mol_type = other RNA
ggcccagactgagcacgtgagttttagagctagaaatagcaagttaaaataaggctagtccgttatcaacttgaaaaagtggcaccgagtcggtgcttcctctggcatcacgtgctcagctccgtcaga

SEQ ID NO: 5143 - RNA, 129 nt, synthetic construct
  source 1..129: mol_type = other RNA
ggcccagactgagcacgtgagttttagagctagaaatagcaagttaaaataaggctagtccgttatcaacttgaaaaagtggcaccgagtcggtgcttcctctggcatcacgtgctcagcactctcaga

SEQ ID NO: 5144 - RNA, 129 nt, synthetic construct
  source 1..129: mol_type = other RNA
ggcccagactgagcacgtgagttttagagctagaaatagcaagttaaaataaggctagtccgttatcaacttgaaaaagtggcaccgagtcggtgcttcctctggcatcacgtgctcagtaagatccag

SEQ ID NO: 5145 - RNA, 129 nt, synthetic construct
  source 1..129: mol_type = other RNA
ggcccagactgagcacgtgagttttagagctagaaatagcaagttaaaataaggctagtccgttatcaacttgaaaaagtggcaccgagtcggtgcttcctctggcatcacgtgctcagttcgatccag

SEQ ID NO: 5146 - RNA, 129 nt, synthetic construct
  source 1..129: mol_type = other RNA
ggcccagactgagcacgtgagttttagagctagaaatagcaagttaaaataaggctagtccgttatcaacttgaaaaagtggcaccgagtcggtgcttcctctggcatcacgtgctcagctcatggcca

SEQ ID NO: 5147 - RNA, 129 nt, synthetic construct
  source 1..129: mol_type = other RNA
ggcccagactgagcacgtgagttttagagctagaaatagcaagttaaaataaggctagtccgttatcaacttgaaaaagtggcaccgagtcggtgcttcctctggcatcacgtgctcagctgctggcca

SEQ ID NO: 5148 - RNA, 129 nt, synthetic construct
  source 1..129: mol_type = other RNA
ggcccagactgagcacgtgagttttagagctagaaatagcaagttaaaataaggctagtccgttatcaacttgaaaaagtggcaccgagtcggtgcttcctctggcatcacgtgctcagctgccctgcc

SEQ ID NO: 5149 - RNA, 129 nt, synthetic construct
  source 1..129: mol_type = other RNA
ggcccagactgagcacgtgagttttagagctagaaatagcaagttaaaataaggctagtccgttatcaacttgaaaaagtggcaccgagtcggtgcttcctctggcatcacgtgctcagctccactgcc

SEQ ID NO: 5150 - RNA, 129 nt, synthetic construct
  source 1..129: mol_type = other RNA
ggcccagactgagcacgtgagttttagagctagaaatagcaagttaaaataaggctagtccgttatcaacttgaaaaagtggcaccgagtcggtgcttcctctggcatcacgtgctcagtatagtatgc

SEQ ID NO: 5151 - RNA, 129 nt, synthetic construct
  source 1..129: mol_type = other RNA
ggcccagactgagcacgtgagttttagagctagaaatagcaagttaaaataaggctagtccgttatcaacttgaaaaagtggcaccgagtcggtgcttcctctggcatcacgtgctcagcttgcaatgc

SEQ ID NO: 5152 - RNA, 129 nt, synthetic construct
  source 1..129: mol_type = other RNA
ggcccagactgagcacgtgagttttagagctagaaatagcaagttaaaataaggctagtccgttatcaacttgaaaaagtggcaccgagtcggtgcttcctctggcatcacgtgctcagctccacgatg

SEQ ID NO: 5153 - RNA, 128 nt, synthetic construct
  source 1..128: mol_type = other RNA
ggcccagactgagcacgtgagttttagagctagaaatagcaagttaaaataaggctagtccgttatcaacttgaaaaagtggcaccgagtcggtgcttcctctggcatcacgtgctcagctgccgatg

SEQ ID NO: 5154 - RNA, 129 nt, synthetic construct
  source 1..129: mol_type = other RNA
ggcccagactgagcacgtgagttttagagctagaaatagcaagttaaaataaggctagtccgttatcaacttgaaaaagtggcaccgagtcggtgcttcctctggcatcacgtgctcagtactcgtgat

SEQ ID NO: 5155 - RNA, 129 nt, synthetic construct
  source 1..129: mol_type = other RNA
ggcccagactgagcacgtgagttttagagctagaaatagcaagttaaaataaggctagtccgttatcaacttgaaaaagtggcaccgagtcggtgcttcctctggcatcacgtgctcagcaagtgtgat

SEQ ID NO: 5156 - RNA, 129 nt, synthetic construct
  source 1..129: mol_type = other RNA
ggcccagactgagcacgtgagttttagagctagaaatagcaagttaaaataaggctagtccgttatcaacttgaaaaagtggcaccgagtcggtgcttcctctggcatcacgtgctcagctacccgtga

SEQ ID NO: 5157 - RNA, 129 nt, synthetic construct
  source 1..129: mol_type = other RNA
ggcccagactgagcacgtgagttttagagctagaaatagcaagttaaaataaggctagtccgttatcaacttgaaaaagtggcaccgagtcggtgcttcctctggcatcacgtgctcagctcaccgtga

SEQ ID NO: 5158 - RNA, 128 nt, synthetic construct
  source 1..128: mol_type = other RNA
ggcccagactgagcacgtgagttttagagctagaaatagcaagttaaaataaggctagtccgttatcaacttgaaaaagtggcaccgagtcggtgcttcctctggcatcacgtgctcagcattacgtg

SEQ ID NO: 5159 - RNA, 128 nt, synthetic construct
  source 1..128: mol_type = other RNA
ggcccagactgagcacgtgagttttagagctagaaatagcaagttaaaataaggctagtccgttatcaacttgaaaaagtggcaccgagtcggtgcttcctctggcatcacgtgctcagctctacgtg

SEQ ID NO: 5160 - RNA, 128 nt, synthetic construct
  source 1..128: mol_type = other RNA
ggcccagactgagcacgtgagttttagagctagaaatagcaagttaaaataaggctagtccgttatcaacttgaaaaagtggcaccgagtcggtgcttcctctggcatcacgtgctcagctgccacgt

SEQ ID NO: 5161 - RNA, 128 nt, synthetic construct
  source 1..128: mol_type = other RNA
ggcccagactgagcacgtgagttttagagctagaaatagcaagttaaaataaggctagtccgttatcaacttgaaaaagtggcaccgagtcggtgcttcctctggcatcacgtgctcagctgtcacgt

SEQ ID NO: 5162 - RNA, 128 nt, synthetic construct
  source 1..128: mol_type = other RNA
ggcccagactgagcacgtgagttttagagctagaaatagcaagttaaaataaggctagtccgttatcaacttgaaaaagtggcaccgagtcggtgcttcctctggcatcacgtgctcagttcgacacg

SEQ ID NO: 5163 - RNA, 128 nt, synthetic construct
  source 1..128: mol_type = other RNA
ggcccagactgagcacgtgagttttagagctagaaatagcaagttaaaataaggctagtccgttatcaacttgaaaaagtggcaccgagtcggtgcttcctctggcatcacgtgctcagtacgacacg

SEQ ID NO: 5164 - RNA, 128 nt, synthetic construct
  source 1..128: mol_type = other RNA
ggcccagactgagcacgtgagttttagagctagaaatagcaagttaaaataaggctagtccgttatcaacttgaaaaagtggcaccgagtcggtgcttcctctggcatcacgtgctcagcttcagcac

SEQ ID NO: 5165 - RNA, 128 nt, synthetic construct
  source 1..128: mol_type = other RNA
ggcccagactgagcacgtgagttttagagctagaaatagcaagttaaaataaggctagtccgttatcaacttgaaaaagtggcaccgagtcggtgcttcctctggcatcacgtgctcagcatcggcac

SEQ ID NO: 5166 - RNA, 129 nt, synthetic construct
  source 1..129: mol_type = other RNA
ggcccagactgagcacgtgagttttagagctagaaatagcaagttaaaataaggctagtccgttatcaacttgaaaaagtggcaccgagtcggtgcttcctctggcatcacgtgctcagcagacgagca

SEQ ID NO: 5167 - RNA, 129 nt, synthetic construct
  source 1..129: mol_type = other RNA
ggcccagactgagcacgtgagttttagagctagaaatagcaagttaaaataaggctagtccgttatcaacttgaaaaagtggcaccgagtcggtgcttcctctggcatcacgtgctcagtactcgagca

SEQ ID NO: 5168 - RNA, 126 nt, synthetic construct
  source 1..126: mol_type = other RNA
ggcccagactgagcacgtgagttttagagctagaaatagcaagttaaaataaggctagtccgttatcaacttgaaaaagtggcaccgagtcggtgcttcctctggcatcacgtgctcagcttgagc

SEQ ID NO: 5169 - RNA, 126 nt, synthetic construct
  source 1..126: mol_type = other RNA
ggcccagactgagcacgtgagttttagagctagaaatagcaagttaaaataaggctagtccgttatcaacttgaaaaagtggcaccgagtcggtgcttcctctggcatcacgtgctcagcatgagc

SEQ ID NO: 5170 - RNA, 129 nt, synthetic construct
  source 1..129: mol_type = other RNA
ggcccagactgagcacgtgagttttagagctagaaatagcaagttaaaataaggctagtccgttatcaacttgaaaaagtggcaccgagtcggtgcttcctctggcatcacgtgctcagcaacgttgag

SEQ ID NO: 5171 - RNA, 127 nt, synthetic construct
  source 1..127: mol_type = other RNA
ggcccagactgagcacgtgagttttagagctagaaatagcaagttaaaataaggctagtccgttatcaacttgaaaaagtggcaccgagtcggtgcttcctctggcatcacgtgctcagcatctgag

SEQ ID NO: 5172 - RNA, 128 nt, synthetic construct
  source 1..128: mol_type = other RNA
ggcccagactgagcacgtgagttttagagctagaaatagcaagttaaaataaggctagtccgttatcaacttgaaaaagtggcaccgagtcggtgcttcctctggcatcacgtgctcagtatcgctga

SEQ ID NO: 5173 - RNA, 128 nt, synthetic construct
  source 1..128: mol_type = other RNA
ggcccagactgagcacgtgagttttagagctagaaatagcaagttaaaataaggctagtccgttatcaacttgaaaaagtggcaccgagtcggtgcttcctctggcatcacgtgctcagtactgctga

SEQ ID NO: 5174 - RNA, 131 nt, synthetic construct
  source 1..131: mol_type = other RNA
ggcccagactgagcacgtgagttttagagctagaaatagcaagttaaaataaggctagtccgttatcaacttgaaaaagtggcaccgagtcggtgcttcctctggcatcacgtgctcagaacgctgaggaa

SEQ ID NO: 5175 - RNA, 131 nt, synthetic construct
  source 1..131: mol_type = other RNA
ggcccagactgagcacgtgagttttagagctagaaatagcaagttaaaataaggctagtccgttatcaacttgaaaaagtggcaccgagtcggtgcttcctctggcatcacgtgctcagaaagctgaggaa

SEQ ID NO: 5176 - RNA, 131 nt, synthetic construct
  source 1..131: mol_type = other RNA
ggcccagactgagcacgtgagttttagagctagaaatagcaagttaaaataaggctagtccgttatcaacttgaaaaagtggcaccgagtcggtgcttcctctggcatcacgtgctcagaaaactagagga

SEQ ID NO: 5177 - RNA, 131 nt, synthetic construct
  source 1..131: mol_type = other RNA
ggcccagactgagcacgtgagttttagagctagaaatagcaagttaaaataaggctagtccgttatcaacttgaaaaagtggcaccgagtcggtgcttcctctggcatcacgtgctcaggactgtagagga

SEQ ID NO: 5178 - RNA, 131 nt, synthetic construct
  source 1..131: mol_type = other RNA
ggcccagactgagcacgtgagttttagagctagaaatagcaagttaaaataaggctagtccgttatcaacttgaaaaagtggcaccgagtcggtgcttcctctggcatcacgtgctcagcaaactcagagg

SEQ ID NO: 5179 - RNA, 131 nt, synthetic construct
  source 1..131: mol_type = other RNA
ggcccagactgagcacgtgagttttagagctagaaatagcaagttaaaataaggctagtccgttatcaacttgaaaaagtggcaccgagtcggtgcttcctctggcatcacgtgctcagcaacatcagagg

SEQ ID NO: 5180 - RNA, 128 nt, synthetic construct
  source 1..128: mol_type = other RNA
ggcccagactgagcacgtgagttttagagctagaaatagcaagttaaaataaggctagtccgttatcaacttgaaaaagtggcaccgagtcggtgcttcctctggcatcacgtgctcagctcccagag

SEQ ID NO: 5181 - RNA, 129 nt, synthetic construct
  source 1..129: mol_type = other RNA
ggcccagactgagcacgtgagttttagagctagaaatagcaagttaaaataaggctagtccgttatcaacttgaaaaagtggcaccgagtcggtgcttcctctggcatcacgtgctcagctacccagag

SEQ ID NO: 5182 - RNA, 131 nt, synthetic construct
  source 1..131: mol_type = other RNA
ggcccagactgagcacgtgagttttagagctagaaatagcaagttaaaataaggctagtccgttatcaacttgaaaaagtggcaccgagtcggtgcttcctctggcatcacgtgctcagaaaatggccaga

SEQ ID NO: 5183 - RNA, 131 nt, synthetic construct
  source 1..131: mol_type = other RNA
ggcccagactgagcacgtgagttttagagctagaaatagcaagttaaaataaggctagtccgttatcaacttgaaaaagtggcaccgagtcggtgcttcctctggcatcacgtgctcagaatatggccaga

SEQ ID NO: 5184 - RNA, 131 nt, synthetic construct
  source 1..131: mol_type = other RNA
ggcccagactgagcacgtgagttttagagctagaaatagcaagttaaaataaggctagtccgttatcaacttgaaaaagtggcaccgagtcggtgcttcctctggcatcacgtgctcagttatactgccag

SEQ ID NO: 5185 - RNA, 131 nt, synthetic construct
  source 1..131: mol_type = other RNA
ggcccagactgagcacgtgagttttagagctagaaatagcaagttaaaataaggctagtccgttatcaacttgaaaaagtggcaccgagtcggtgcttcctctggcatcacgtgctcagatctactgccag

SEQ ID NO: 5186 - RNA, 130 nt, synthetic construct
  source 1..130: mol_type = other RNA
ggcccagactgagcacgtgagttttagagctagaaatagcaagttaaaataaggctagtccgttatcaacttgaaaaagtggcaccgagtcggtgcttcctctggcatcacgtgctcagttaacatgcca

SEQ ID NO: 5187 - RNA, 130 nt, synthetic construct
  source 1..130: mol_type = other RNA
ggcccagactgagcacgtgagttttagagctagaaatagcaagttaaaataaggctagtccgttatcaacttgaaaaagtggcaccgagtcggtgcttcctctggcatcacgtgctcagttcatatgcca

SEQ ID NO: 5188 - RNA, 131 nt, synthetic construct
  source 1..131: mol_type = other RNA
ggcccagactgagcacgtgagttttagagctagaaatagcaagttaaaataaggctagtccgttatcaacttgaaaaagtggcaccgagtcggtgcttcctctggcatcacgtgctcagaaagacgatgcc

SEQ ID NO: 5189 - RNA, 130 nt, synthetic construct
  source 1..130: mol_type = other RNA
ggcccagactgagcacgtgagttttagagctagaaatagcaagttaaaataaggctagtccgttatcaacttgaaaaagtggcaccgagtcggtgcttcctctggcatcacgtgctcaggagacgatgcc

SEQ ID NO: 5190 - RNA, 131 nt, synthetic construct
  source 1..131: mol_type = other RNA
ggcccagactgagcacgtgagttttagagctagaaatagcaagttaaaataaggctagtccgttatcaacttgaaaaagtggcaccgagtcggtgcttcctctggcatcacgtgctcagttcctctgatgc

SEQ ID NO: 5191 - RNA, 131 nt, synthetic construct
  source 1..131: mol_type = other RNA
ggcccagactgagcacgtgagttttagagctagaaatagcaagttaaaataaggctagtccgttatcaacttgaaaaagtggcaccgagtcggtgcttcctctggcatcacgtgctcagttatattgatgc

SEQ ID NO: 5192 - RNA, 131 nt, synthetic construct
  source 1..131: mol_type = other RNA
ggcccagactgagcacgtgagttttagagctagaaatagcaagttaaaataaggctagtccgttatcaacttgaaaaagtggcaccgagtcggtgcttcctctggcatcacgtgctcagaaatctgtgatg

SEQ ID NO: 5193 - RNA, 131 nt, synthetic construct
  source 1..131: mol_type = other RNA
ggcccagactgagcacgtgagttttagagctagaaatagcaagttaaaataaggctagtccgttatcaacttgaaaaagtggcaccgagtcggtgcttcctctggcatcacgtgctcagaattctgtgatg

SEQ ID NO: 5194 - RNA, 130 nt, synthetic construct
  source 1..130: mol_type = other RNA
ggcccagactgagcacgtgagttttagagctagaaatagcaagttaaaataaggctagtccgttatcaacttgaaaaagtggcaccgagtcggtgcttcctctggcatcacgtgctcagctcgtcgtgat

SEQ ID NO: 5195 - RNA, 130 nt, synthetic construct
  source 1..130: mol_type = other RNA
ggcccagactgagcacgtgagttttagagctagaaatagcaagttaaaataaggctagtccgttatcaacttgaaaaagtggcaccgagtcggtgcttcctctggcatcacgtgctcagttcgtcgtgat

SEQ ID NO: 5196 - RNA, 131 nt, synthetic construct
  source 1..131: mol_type = other RNA
ggcccagactgagcacgtgagttttagagctagaaatagcaagttaaaataaggctagtccgttatcaacttgaaaaagtggcaccgagtcggtgcttcctctggcatcacgtgctcagcgttatacgtga

SEQ ID NO: 5197 - RNA, 131 nt, synthetic construct
  source 1..131: mol_type = other RNA
ggcccagactgagcacgtgagttttagagctagaaatagcaagttaaaataaggctagtccgttatcaacttgaaaaagtggcaccgagtcggtgcttcctctggcatcacgtgctcagttctatacgtga

SEQ ID NO: 5198 - RNA, 131 nt, synthetic construct
  source 1..131: mol_type = other RNA
ggcccagactgagcacgtgagttttagagctagaaatagcaagttaaaataaggctagtccgttatcaacttgaaaaagtggcaccgagtcggtgcttcctctggcatcacgtgctcagttgtctcacgtg

SEQ ID NO: 5199 - RNA, 131 nt, synthetic construct
  source 1..131: mol_type = other RNA
ggcccagactgagcacgtgagttttagagctagaaatagcaagttaaaataaggctagtccgttatcaacttgaaaaagtggcaccgagtcggtgcttcctctggcatcacgtgctcagttctctcacgtg

SEQ ID NO: 5200 - RNA, 131 nt, synthetic construct
  source 1..131: mol_type = other RNA
ggcccagactgagcacgtgagttttagagctagaaatagcaagttaaaataaggctagtccgttatcaacttgaaaaagtggcaccgagtcggtgcttcctctggcatcacgtgctcaggtgactgcacgt

SEQ ID NO: 5201 - RNA, 131 nt, synthetic construct
  source 1..131: mol_type = other RNA
ggcccagactgagcacgtgagttttagagctagaaatagcaagttaaaataaggctagtccgttatcaacttgaaaaagtggcaccgagtcggtgcttcctctggcatcacgtgctcaggttactgcacgt

SEQ ID NO: 5202 - RNA, 131 nt, synthetic construct
  source 1..131: mol_type = other RNA
ggcccagactgagcacgtgagttttagagctagaaatagcaagttaaaataaggctagtccgttatcaacttgaaaaagtggcaccgagtcggtgcttcctctggcatcacgtgctcagcgatctagcacg

SEQ ID NO: 5203 - RNA, 131 nt, synthetic construct
  source 1..131: mol_type = other RNA
ggcccagactgagcacgtgagttttagagctagaaatagcaagttaaaataaggctagtccgttatcaacttgaaaaagtggcaccgagtcggtgcttcctctggcatcacgtgctcagcaatctagcacg

SEQ ID NO: 5204 - RNA, 128 nt, synthetic construct
  source 1..128: mol_type = other RNA
ggcccagactgagcacgtgagttttagagctagaaatagcaagttaaaataaggctagtccgttatcaacttgaaaaagtggcaccgagtcggtgcttcctctggcatcacgtgctcagtgtgagcac

SEQ ID NO: 5205 - RNA, 128 nt, synthetic construct
  source 1..128: mol_type = other RNA
ggcccagactgagcacgtgagttttagagctagaaatagcaagttaaaataaggctagtccgttatcaacttgaaaaagtggcaccgagtcggtgcttcctctggcatcacgtgctcaggttgagcac

SEQ ID NO: 5206 - RNA, 131 nt, synthetic construct
  source 1..131: mol_type = other RNA
ggcccagactgagcacgtgagttttagagctagaaatagcaagttaaaataaggctagtccgttatcaacttgaaaaagtggcaccgagtcggtgcttcctctggcatcacgtgctcagaacaattgagca

SEQ ID NO: 5207 - RNA, 131 nt, synthetic construct
  source 1..131: mol_type = other RNA
ggcccagactgagcacgtgagttttagagctagaaatagcaagttaaaataaggctagtccgttatcaacttgaaaaagtggcaccgagtcggtgcttcctctggcatcacgtgctcagaaaaattgagca

SEQ ID NO: 5208 - RNA, 131 nt, synthetic construct
  source 1..131: mol_type = other RNA
ggcccagactgagcacgtgagttttagagctagaaatagcaagttaaaataaggctagtccgttatcaacttgaaaaagtggcaccgagtcggtgcttcctctggcatcacgtgctcaggacggtctgagc

SEQ ID NO: 5209 - RNA, 131 nt, synthetic construct
  source 1..131: mol_type = other RNA
ggcccagactgagcacgtgagttttagagctagaaatagcaagttaaaataaggctagtccgttatcaacttgaaaaagtggcaccgagtcggtgcttcctctggcatcacgtgctcaggtcgctctgagc

SEQ ID NO: 5210 - RNA, 133 nt, synthetic construct
  source 1..133: mol_type = other RNA
ggcccagactgagcacgtgagttttagagctagaaatagcaagttaaaataaggctagtccgttatcaacttgaaaaagtggcaccgagtcggtgcttcctctggcatcacgtgctcagcaaaatcagaggaa

SEQ ID NO: 5211 - RNA, 133 nt, synthetic construct
  source 1..133: mol_type = other RNA
ggcccagactgagcacgtgagttttagagctagaaatagcaagttaaaataaggctagtccgttatcaacttgaaaaagtggcaccgagtcggtgcttcctctggcatcacgtgctcagcaacatcagaggaa

SEQ ID NO: 5212 - RNA, 133 nt, synthetic construct
  source 1..133: mol_type = other RNA
ggcccagactgagcacgtgagttttagagctagaaatagcaagttaaaataaggctagtccgttatcaacttgaaaaagtggcaccgagtcggtgcttcctctggcatcacgtgctcagaatcatccagagga

SEQ ID NO: 5213 - RNA, 130 nt, synthetic construct
  source 1..130: mol_type = other RNA
ggcccagactgagcacgtgagttttagagctagaaatagcaagttaaaataaggctagtccgttatcaacttgaaaaagtggcaccgagtcggtgcttcctctggcatcacgtgctcagctcccagagga

SEQ ID NO: 5214 - RNA, 133 nt, synthetic construct
  source 1..133: mol_type = other RNA
ggcccagactgagcacgtgagttttagagctagaaatagcaagttaaaataaggctagtccgttatcaacttgaaaaagtggcaccgagtcggtgcttcctctggcatcacgtgctcagaatctggccagagg

SEQ ID NO: 5215 - RNA, 133 nt, synthetic construct
  source 1..133: mol_type = other RNA
ggcccagactgagcacgtgagttttagagctagaaatagcaagttaaaataaggctagtccgttatcaacttgaaaaagtggcaccgagtcggtgcttcctctggcatcacgtgctcagaaaatggccagagg

SEQ ID NO: 5216 - RNA, 133 nt, synthetic construct
  source 1..133: mol_type = other RNA
ggcccagactgagcacgtgagttttagagctagaaatagcaagttaaaataaggctagtccgttatcaacttgaaaaagtggcaccgagtcggtgcttcctctggcatcacgtgctcagaagatctgccagag

SEQ ID NO: 5217 - RNA, 133 nt, synthetic construct
  source 1..133: mol_type = other RNA
ggcccagactgagcacgtgagttttagagctagaaatagcaagttaaaataaggctagtccgttatcaacttgaaaaagtggcaccgagtcggtgcttcctctggcatcacgtgctcagaagaactgccagag

SEQ ID NO: 5218 - RNA, 131 nt, synthetic construct
  source 1..131: mol_type = other RNA
ggcccagactgagcacgtgagttttagagctagaaatagcaagttaaaataaggctagtccgttatcaacttgaaaaagtggcaccgagtcggtgcttcctctggcatcacgtgctcagaaatatgccaga

SEQ ID NO: 5219 - RNA, 133 nt, synthetic construct
  source 1..133: mol_type = other RNA
ggcccagactgagcacgtgagttttagagctagaaatagcaagttaaaataaggctagtccgttatcaacttgaaaaagtggcaccgagtcggtgcttcctctggcatcacgtgctcaggaaaacatgccaga

SEQ ID NO: 5220 - RNA, 133 nt, synthetic construct
  source 1..133: mol_type = other RNA
ggcccagactgagcacgtgagttttagagctagaaatagcaagttaaaataaggctagtccgttatcaacttgaaaaagtggcaccgagtcggtgcttcctctggcatcacgtgctcagattctggatgccag

SEQ ID NO: 5221 - RNA, 133 nt, synthetic construct
  source 1..133: mol_type = other RNA
ggcccagactgagcacgtgagttttagagctagaaatagcaagttaaaataaggctagtccgttatcaacttgaaaaagtggcaccgagtcggtgcttcctctggcatcacgtgctcagaaagacgatgccag

SEQ ID NO: 5222 - RNA, 133 nt, synthetic construct
  source 1..133: mol_type = other RNA
ggcccagactgagcacgtgagttttagagctagaaatagcaagttaaaataaggctagtccgttatcaacttgaaaaagtggcaccgagtcggtgcttcctctggcatcacgtgctcagattctctgatgcca

SEQ ID NO: 5223 - RNA, 133 nt, synthetic construct
  source 1..133: mol_type = other RNA
ggcccagactgagcacgtgagttttagagctagaaatagcaagttaaaataaggctagtccgttatcaacttgaaaaagtggcaccgagtcggtgcttcctctggcatcacgtgctcagaatctctgatgcca

SEQ ID NO: 5224 - RNA, 133 nt, synthetic construct
  source 1..133: mol_type = other RNA
ggcccagactgagcacgtgagttttagagctagaaatagcaagttaaaataaggctagtccgttatcaacttgaaaaagtggcaccgagtcggtgcttcctctggcatcacgtgctcagctatctgtgatgcc

SEQ ID NO: 5225 - RNA, 133 nt, synthetic construct
  source 1..133: mol_type = other RNA
ggcccagactgagcacgtgagttttagagctagaaatagcaagttaaaataaggctagtccgttatcaacttgaaaaagtggcaccgagtcggtgcttcctctggcatcacgtgctcagaattctgtgatgcc

SEQ ID NO: 5226 - RNA, 131 nt, synthetic construct
  source 1..131: mol_type = other RNA
ggcccagactgagcacgtgagttttagagctagaaatagcaagttaaaataaggctagtccgttatcaacttgaaaaagtggcaccgagtcggtgcttcctctggcatcacgtgctcaggatccgtgatgc

SEQ ID NO: 5227 - RNA, 131 nt, synthetic construct
  source 1..131: mol_type = other RNA
ggcccagactgagcacgtgagttttagagctagaaatagcaagttaaaataaggctagtccgttatcaacttgaaaaagtggcaccgagtcggtgcttcctctggcatcacgtgctcagaatccgtgatgc

SEQ ID NO: 5228 - RNA, 133 nt, synthetic construct
  source 1..133: mol_type = other RNA
ggcccagactgagcacgtgagttttagagctagaaatagcaagttaaaataaggctagtccgttatcaacttgaaaaagtggcaccgagtcggtgcttcctctggcatcacgtgctcagctccatacgtgatg

SEQ ID NO: 5229 - RNA, 133 nt, synthetic construct
  source 1..133: mol_type = other RNA
ggcccagactgagcacgtgagttttagagctagaaatagcaagttaaaataaggctagtccgttatcaacttgaaaaagtggcaccgagtcggtgcttcctctggcatcacgtgctcagcaccatacgtgatg

SEQ ID NO: 5230 - RNA, 133 nt, synthetic construct
  source 1..133: mol_type = other RNA
ggcccagactgagcacgtgagttttagagctagaaatagcaagttaaaataaggctagtccgttatcaacttgaaaaagtggcaccgagtcggtgcttcctctggcatcacgtgctcaggattctcacgtgat

SEQ ID NO: 5231 - RNA, 133 nt, synthetic construct
  source 1..133: mol_type = other RNA
ggcccagactgagcacgtgagttttagagctagaaatagcaagttaaaataaggctagtccgttatcaacttgaaaaagtggcaccgagtcggtgcttcctctggcatcacgtgctcagatccctcacgtgat

SEQ ID NO: 5232 - RNA, 133 nt, synthetic construct
  source 1..133: mol_type = other RNA
ggcccagactgagcacgtgagttttagagctagaaatagcaagttaaaataaggctagtccgttatcaacttgaaaaagtggcaccgagtcggtgcttcctctggcatcacgtgctcaggacactgcacgtga

SEQ ID NO: 5233 - RNA, 133 nt, synthetic construct
  source 1..133: mol_type = other RNA
ggcccagactgagcacgtgagttttagagctagaaatagcaagttaaaataaggctagtccgttatcaacttgaaaaagtggcaccgagtcggtgcttcctctggcatcacgtgctcaggtcactgcacgtga

SEQ ID NO: 5234 - RNA, 133 nt, synthetic construct
  source 1..133: mol_type = other RNA
ggcccagactgagcacgtgagttttagagctagaaatagcaagttaaaataaggctagtccgttatcaacttgaaaaagtggcaccgagtcggtgcttcctctggcatcacgtgctcagcgctctagcacgtg

SEQ ID NO: 5235 - RNA, 133 nt, synthetic construct
  source 1..133: mol_type = other RNA
ggcccagactgagcacgtgagttttagagctagaaatagcaagttaaaataaggctagtccgttatcaacttgaaaaagtggcaccgagtcggtgcttcctctggcatcacgtgctcagcactctagcacgtg

SEQ ID NO: 5236 - RNA, 130 nt, synthetic construct
  source 1..130: mol_type = other RNA
ggcccagactgagcacgtgagttttagagctagaaatagcaagttaaaataaggctagtccgttatcaacttgaaaaagtggcaccgagtcggtgcttcctctggcatcacgtgctcagtatgagcacgt

SEQ ID NO: 5237 - RNA, 130 nt, synthetic construct
  source 1..130: mol_type = other RNA
ggcccagactgagcacgtgagttttagagctagaaatagcaagttaaaataaggctagtccgttatcaacttgaaaaagtggcaccgagtcggtgcttcctctggcatcacgtgctcagagtgagcacgt

SEQ ID NO: 5238 - RNA, 133 nt, synthetic construct
  source 1..133: mol_type = other RNA
ggcccagactgagcacgtgagttttagagctagaaatagcaagttaaaataaggctagtccgttatcaacttgaaaaagtggcaccgagtcggtgcttcctctggcatcacgtgctcagaaaaattgagcacg

SEQ ID NO: 5239 - RNA, 133 nt, synthetic construct
  source 1..133: mol_type = other RNA
ggcccagactgagcacgtgagttttagagctagaaatagcaagttaaaataaggctagtccgttatcaacttgaaaaagtggcaccgagtcggtgcttcctctggcatcacgtgctcagattgattgagcacg

SEQ ID NO: 5240 - RNA, 133 nt, synthetic construct
  source 1..133: mol_type = other RNA
ggcccagactgagcacgtgagttttagagctagaaatagcaagttaaaataaggctagtccgttatcaacttgaaaaagtggcaccgagtcggtgcttcctctggcatcacgtgctcaggtaactctgagcac

SEQ ID NO: 5241 - RNA, 133 nt, synthetic construct
  source 1..133: mol_type = other RNA
ggcccagactgagcacgtgagttttagagctagaaatagcaagttaaaataaggctagtccgttatcaacttgaaaaagtggcaccgagtcggtgcttcctctggcatcacgtgctcaggaaagtctgagcac

SEQ ID NO: 5242 - RNA, 124 nt, synthetic construct
  source 1..124: mol_type = other RNA
ggcccagactgagcacgtgagttttagagctagaaatagcaagttaaaataaggctagtccgttatcaacttgaaaaagtggcaccgagtcggtgcttcctctgccatcaaagcgtgctcagtc

SEQ ID NO: 5243 - RNA, 134 nt, synthetic construct
  source 1..134: mol_type = other RNA
ggcccagactgagcacgtgagttttagagctagaaatagcaagttaaaataaggctagtccgttatcaacttgaaaaagtggcaccgagtcggtgcttcctctgccatcaaagcgtgctcagtctcacctggaa

SEQ ID NO: 5244 - RNA, 134 nt, synthetic construct
  source 1..134: mol_type = other RNA
ggcccagactgagcacgtgagttttagagctagaaatagcaagttaaaataaggctagtccgttatcaacttgaaaaagtggcaccgagtcggtgcttcctctgccatcaaagcgtgctcagtctccgacggaa

SEQ ID NO: 5245 - RNA, 134 nt, synthetic construct
  source 1..134: mol_type = other RNA
ggcccagactgagcacgtgagttttagagctagaaatagcaagttaaaataaggctagtccgttatcaacttgaaaaagtggcaccgagtcggtgcttcctctgccatcaaagcgtgctcagtcttatgtagga

SEQ ID NO: 5246 - RNA, 134 nt, synthetic construct
  source 1..134: mol_type = other RNA
ggcccagactgagcacgtgagttttagagctagaaatagcaagttaaaataaggctagtccgttatcaacttgaaaaagtggcaccgagtcggtgcttcctctgccatcaaagcgtgctcagtcacctcaagga

SEQ ID NO: 5247 - RNA, 134 nt, synthetic construct
  source 1..134: mol_type = other RNA
ggcccagactgagcacgtgagttttagagctagaaatagcaagttaaaataaggctagtccgttatcaacttgaaaaagtggcaccgagtcggtgcttcctctgccatcaaagcgtgctcagtcaagaacgagg

SEQ ID NO: 5248 - RNA, 134 nt, synthetic construct
  source 1..134: mol_type = other RNA
ggcccagactgagcacgtgagttttagagctagaaatagcaagttaaaataaggctagtccgttatcaacttgaaaaagtggcaccgagtcggtgcttcctctgccatcaaagcgtgctcagtcccgaacgagg

SEQ ID NO: 5249 - RNA, 134 nt, synthetic construct
  source 1..134: mol_type = other RNA
ggcccagactgagcacgtgagttttagagctagaaatagcaagttaaaataaggctagtccgttatcaacttgaaaaagtggcaccgagtcggtgcttcctctgccatcaaagcgtgctcagtctaccttagag

SEQ ID NO: 5250 - RNA, 134 nt, synthetic construct
  source 1..134: mol_type = other RNA
ggcccagactgagcacgtgagttttagagctagaaatagcaagttaaaataaggctagtccgttatcaacttgaaaaagtggcaccgagtcggtgcttcctctgccatcaaagcgtgctcagtcttagttagag

SEQ ID NO: 5251 - RNA, 133 nt, synthetic construct
  source 1..133: mol_type = other RNA
ggcccagactgagcacgtgagttttagagctagaaatagcaagttaaaataaggctagtccgttatcaacttgaaaaagtggcaccgagtcggtgcttcctctgccatcaaagcgtgctcagtcctcttcaga

SEQ ID NO: 5252 - RNA, 131 nt, synthetic construct
  source 1..131: mol_type = other RNA
ggcccagactgagcacgtgagttttagagctagaaatagcaagttaaaataaggctagtccgttatcaacttgaaaaagtggcaccgagtcggtgcttcctctgccatcaaagcgtgctcagtccaccaga

SEQ ID NO: 5253 - RNA, 134 nt, synthetic construct
  source 1..134: mol_type = other RNA
ggcccagactgagcacgtgagttttagagctagaaatagcaagttaaaataaggctagtccgttatcaacttgaaaaagtggcaccgagtcggtgcttcctctgccatcaaagcgtgctcagtcatccttgcag

SEQ ID NO: 5254 - RNA, 134 nt, synthetic construct
  source 1..134: mol_type = other RNA
ggcccagactgagcacgtgagttttagagctagaaatagcaagttaaaataaggctagtccgttatcaacttgaaaaagtggcaccgagtcggtgcttcctctgccatcaaagcgtgctcagtctcacctgcag

SEQ ID NO: 5255 - RNA, 130 nt, synthetic construct
  source 1..130: mol_type = other RNA
ggcccagactgagcacgtgagttttagagctagaaatagcaagttaaaataaggctagtccgttatcaacttgaaaaagtggcaccgagtcggtgcttcctctgccatcaaagcgtgctcagtcacggca

SEQ ID NO: 5256 - RNA, 134 nt, synthetic construct
  source 1..134: mol_type = other RNA
ggcccagactgagcacgtgagttttagagctagaaatagcaagttaaaataaggctagtccgttatcaacttgaaaaagtggcaccgagtcggtgcttcctctgccatcaaagcgtgctcagtccagcccggca

SEQ ID NO: 5257 - RNA, 134 nt, synthetic construct
  source 1..134: mol_type = other RNA
ggcccagactgagcacgtgagttttagagctagaaatagcaagttaaaataaggctagtccgttatcaacttgaaaaagtggcaccgagtcggtgcttcctctgccatcaaagcgtgctcagtccccacctggc

SEQ ID NO: 5258 - RNA, 134 nt, synthetic construct
  source 1..134: mol_type = other RNA
ggcccagactgagcacgtgagttttagagctagaaatagcaagttaaaataaggctagtccgttatcaacttgaaaaagtggcaccgagtcggtgcttcctctgccatcaaagcgtgctcagtctacacctggc

SEQ ID NO: 5259 - RNA, 134 nt, synthetic construct
  source 1..134: mol_type = other RNA
ggcccagactgagcacgtgagttttagagctagaaatagcaagttaaaataaggctagtccgttatcaacttgaaaaagtggcaccgagtcggtgcttcctctgccatcaaagcgtgctcagtccccactatgg

SEQ ID NO: 5260 - RNA, 134 nt, synthetic construct
  source 1..134: mol_type = other RNA
ggcccagactgagcacgtgagttttagagctagaaatagcaagttaaaataaggctagtccgttatcaacttgaaaaagtggcaccgagtcggtgcttcctctgccatcaaagcgtgctcagtctcatccatgg

SEQ ID NO: 5261 - RNA, 133 nt, synthetic construct
  source 1..133: mol_type = other RNA
ggcccagactgagcacgtgagttttagagctagaaatagcaagttaaaataaggctagtccgttatcaacttgaaaaagtggcaccgagtcggtgcttcctctgccatcaaagcgtgctcagtccccatgatg

SEQ ID NO: 5262 - RNA, 133 nt, synthetic construct
  source 1..133: mol_type = other RNA
ggcccagactgagcacgtgagttttagagctagaaatagcaagttaaaataaggctagtccgttatcaacttgaaaaagtggcaccgagtcggtgcttcctctgccatcaaagcgtgctcagtcccaccgatg

SEQ ID NO: 5263 - RNA, 134 nt, synthetic construct
  source 1..134: mol_type = other RNA
ggcccagactgagcacgtgagttttagagctagaaatagcaagttaaaataaggctagtccgttatcaacttgaaaaagtggcaccgagtcggtgcttcctctgccatcaaagcgtgctcagtcccaagttgat

SEQ ID NO: 5264 - RNA, 134 nt, synthetic construct
  source 1..134: mol_type = other RNA
ggcccagactgagcacgtgagttttagagctagaaatagcaagttaaaataaggctagtccgttatcaacttgaaaaagtggcaccgagtcggtgcttcctctgccatcaaagcgtgctcagtccaaagttgat

SEQ ID NO: 5265 - RNA, 134 nt, synthetic construct
  source 1..134: mol_type = other RNA
ggcccagactgagcacgtgagttttagagctagaaatagcaagttaaaataaggctagtccgttatcaacttgaaaaagtggcaccgagtcggtgcttcctctgccatcaaagcgtgctcagtccccctgttga

SEQ ID NO: 5266 - RNA, 134 nt, synthetic construct
  source 1..134: mol_type = other RNA
ggcccagactgagcacgtgagttttagagctagaaatagcaagttaaaataaggctagtccgttatcaacttgaaaaagtggcaccgagtcggtgcttcctctgccatcaaagcgtgctcagtcctcctgttga

SEQ ID NO: 5267 - RNA, 134 nt, synthetic construct
  source 1..134: mol_type = other RNA
ggcccagactgagcacgtgagttttagagctagaaatagcaagttaaaataaggctagtccgttatcaacttgaaaaagtggcaccgagtcggtgcttcctctgccatcaaagcgtgctcagtccattgtgctt

SEQ ID NO: 5268 - RNA, 134 nt, synthetic construct
  source 1..134: mol_type = other RNA
ggcccagactgagcacgtgagttttagagctagaaatagcaagttaaaataaggctagtccgttatcaacttgaaaaagtggcaccgagtcggtgcttcctctgccatcaaagcgtgctcagtccctcctgctt

SEQ ID NO: 5269 - RNA, 134 nt, synthetic construct
  source 1..134: mol_type = other RNA
ggcccagactgagcacgtgagttttagagctagaaatagcaagttaaaataaggctagtccgttatcaacttgaaaaagtggcaccgagtcggtgcttcctctgccatcaaagcgtgctcagtcaaactccgct

SEQ ID NO: 5270 - RNA, 134 nt, synthetic construct
  source 1..134: mol_type = other RNA
ggcccagactgagcacgtgagttttagagctagaaatagcaagttaaaataaggctagtccgttatcaacttgaaaaagtggcaccgagtcggtgcttcctctgccatcaaagcgtgctcagtcatactccgct

SEQ ID NO: 5271 - RNA, 134 nt, synthetic construct
  source 1..134: mol_type = other RNA
ggcccagactgagcacgtgagttttagagctagaaatagcaagttaaaataaggctagtccgttatcaacttgaaaaagtggcaccgagtcggtgcttcctctgccatcaaagcgtgctcagtcaaccatacgc

SEQ ID NO: 5272 - RNA, 134 nt, synthetic construct
  source 1..134: mol_type = other RNA
ggcccagactgagcacgtgagttttagagctagaaatagcaagttaaaataaggctagtccgttatcaacttgaaaaagtggcaccgagtcggtgcttcctctgccatcaaagcgtgctcagtcattaatacgc

SEQ ID NO: 5273 - RNA, 134 nt, synthetic construct
  source 1..134: mol_type = other RNA
ggcccagactgagcacgtgagttttagagctagaaatagcaagttaaaataaggctagtccgttatcaacttgaaaaagtggcaccgagtcggtgcttcctctgccatcaaagcgtgctcagtcttccctcacg

SEQ ID NO: 5274 - RNA, 134 nt, synthetic construct
  source 1..134: mol_type = other RNA
ggcccagactgagcacgtgagttttagagctagaaatagcaagttaaaataaggctagtccgttatcaacttgaaaaagtggcaccgagtcggtgcttcctctgccatcaaagcgtgctcagtcactcctcacg

SEQ ID NO: 5275 - RNA, 134 nt, synthetic construct
  source 1..134: mol_type = other RNA
ggcccagactgagcacgtgagttttagagctagaaatagcaagttaaaataaggctagtccgttatcaacttgaaaaagtggcaccgagtcggtgcttcctctgccatcaaagcgtgctcagtcttcactgcac

SEQ ID NO: 5276 - RNA, 134 nt, synthetic construct
  source 1..134: mol_type = other RNA
ggcccagactgagcacgtgagttttagagctagaaatagcaagttaaaataaggctagtccgttatcaacttgaaaaagtggcaccgagtcggtgcttcctctgccatcaaagcgtgctcagtccacactgcac

SEQ ID NO: 5277 - RNA, 134 nt, synthetic construct
  source 1..134: mol_type = other RNA
ggcccagactgagcacgtgagttttagagctagaaatagcaagttaaaataaggctagtccgttatcaacttgaaaaagtggcaccgagtcggtgcttcctctgccatcaaagcgtgctcagtctatattagca

SEQ ID NO: 5278 - RNA, 134 nt, synthetic construct
  source 1..134: mol_type = other RNA
ggcccagactgagcacgtgagttttagagctagaaatagcaagttaaaataaggctagtccgttatcaacttgaaaaagtggcaccgagtcggtgcttcctctgccatcaaagcgtgctcagtcgatattagca

SEQ ID NO: 5279 - RNA, 134 nt, synthetic construct
  source 1..134: mol_type = other RNA
ggcccagactgagcacgtgagttttagagctagaaatagcaagttaaaataaggctagtccgttatcaacttgaaaaagtggcaccgagtcggtgcttcctctgccatcaaagcgtgctcagtcgactacgagc

SEQ ID NO: 5280 - RNA, 134 nt, synthetic construct
  source 1..134: mol_type = other RNA
ggcccagactgagcacgtgagttttagagctagaaatagcaagttaaaataaggctagtccgttatcaacttgaaaaagtggcaccgagtcggtgcttcctctgccatcaaagcgtgctcagtcttctacgagc

SEQ ID NO: 5281 - RNA, 134 nt, synthetic construct
  source 1..134: mol_type = other RNA
ggcccagactgagcacgtgagttttagagctagaaatagcaagttaaaataaggctagtccgttatcaacttgaaaaagtggcaccgagtcggtgcttcctctgccatcaaagcgtgctcagtcccaagttgag

SEQ ID NO: 5282 - RNA, 134 nt, synthetic construct
  source 1..134: mol_type = other RNA
ggcccagactgagcacgtgagttttagagctagaaatagcaagttaaaataaggctagtccgttatcaacttgaaaaagtggcaccgagtcggtgcttcctctgccatcaaagcgtgctcagtctctagttgag

SEQ ID NO: 5283 - RNA, 131 nt, synthetic construct
  source 1..131: mol_type = other RNA
ggcccagactgagcacgtgagttttagagctagaaatagcaagttaaaataaggctagtccgttatcaacttgaaaaagtggcaccgagtcggtgcttcctctgccatcaaagcgtgctcagtcctactga

SEQ ID NO: 5284 - RNA, 131 nt, synthetic construct
  source 1..131: mol_type = other RNA
ggcccagactgagcacgtgagttttagagctagaaatagcaagttaaaataaggctagtccgttatcaacttgaaaaagtggcaccgagtcggtgcttcctctgccatcaaagcgtgctcagtcttactga

SEQ ID NO: 5285 - RNA, 132 nt, synthetic construct
  source 1..132: mol_type = other RNA
ggcccagactgagcacgtgagttttagagctagaaatagcaagttaaaataaggctagtccgttatcaacttgaaaaagtggcaccgagtcggtgcttcctctgccatcaaagcgtgctcagtcaacgactg

SEQ ID NO: 5286 - RNA, 133 nt, synthetic construct
  source 1..133: mol_type = other RNA
ggcccagactgagcacgtgagttttagagctagaaatagcaagttaaaataaggctagtccgttatcaacttgaaaaagtggcaccgagtcggtgcttcctctgccatcaaagcgtgctcagtcaacggactg

SEQ ID NO: 5287 - RNA, 133 nt, synthetic construct
  source 1..133: mol_type = other RNA
ggcccagactgagcacgtgagttttagagctagaaatagcaagttaaaataaggctagtccgttatcaacttgaaaaagtggcaccgagtcggtgcttcctctgccatcaaagcgtgctcagtctcttggact

SEQ ID NO: 5288 - RNA, 133 nt, synthetic construct
  source 1..133: mol_type = other RNA
ggcccagactgagcacgtgagttttagagctagaaatagcaagttaaaataaggctagtccgttatcaacttgaaaaagtggcaccgagtcggtgcttcctctgccatcaaagcgtgctcagtcttacggact

SEQ ID NO: 5289 - RNA, 136 nt, synthetic construct
  source 1..136: mol_type = other RNA
ggcccagactgagcacgtgagttttagagctagaaatagcaagttaaaataaggctagtccgttatcaacttgaaaaagtggcaccgagtcggtgcttcctctgccatcaaagcgtgctcagtctcgaacgaggaa

SEQ ID NO: 5290 - RNA, 136 nt, synthetic construct
  source 1..136: mol_type = other RNA
ggcccagactgagcacgtgagttttagagctagaaatagcaagttaaaataaggctagtccgttatcaacttgaaaaagtggcaccgagtcggtgcttcctctgccatcaaagcgtgctcagtcccgaacgaggaa

SEQ ID NO: 5291 - RNA, 135 nt, synthetic construct
  source 1..135: mol_type = other RNA
ggcccagactgagcacgtgagttttagagctagaaatagcaagttaaaataaggctagtccgttatcaacttgaaaaagtggcaccgagtcggtgcttcctctgccatcaaagcgtgctcagtccatctagagga

SEQ ID NO: 5292 - RNA, 135 nt, synthetic construct
  source 1..135: mol_type = other RNA
ggcccagactgagcacgtgagttttagagctagaaatagcaagttaaaataaggctagtccgttatcaacttgaaaaagtggcaccgagtcggtgcttcctctgccatcaaagcgtgctcagtctatctagagga

SEQ ID NO: 5293 - RNA, 134 nt, synthetic construct
  source 1..134: mol_type = other RNA
ggcccagactgagcacgtgagttttagagctagaaatagcaagttaaaataaggctagtccgttatcaacttgaaaaagtggcaccgagtcggtgcttcctctgccatcaaagcgtgctcagtcacatcagagg

SEQ ID NO: 5294 - RNA, 134 nt, synthetic construct
  source 1..134: mol_type = other RNA
ggcccagactgagcacgtgagttttagagctagaaatagcaagttaaaataaggctagtccgttatcaacttgaaaaagtggcaccgagtcggtgcttcctctgccatcaaagcgtgctcagtcccttcagagg

SEQ ID NO: 5295 - RNA, 133 nt, synthetic construct
  source 1..133: mol_type = other RNA
ggcccagactgagcacgtgagttttagagctagaaatagcaagttaaaataaggctagtccgttatcaacttgaaaaagtggcaccgagtcggtgcttcctctgccatcaaagcgtgctcagtccttgcagag

SEQ ID NO: 5296 - RNA, 133 nt, synthetic construct
  source 1..133: mol_type = other RNA
ggcccagactgagcacgtgagttttagagctagaaatagcaagttaaaataaggctagtccgttatcaacttgaaaaagtggcaccgagtcggtgcttcctctgccatcaaagcgtgctcagtccacgcagag

SEQ ID NO: 5297 - RNA, 133 nt, synthetic construct
  source 1..133: mol_type = other RNA
ggcccagactgagcacgtgagttttagagctagaaatagcaagttaaaataaggctagtccgttatcaacttgaaaaagtggcaccgagtcggtgcttcctctgccatcaaagcgtgctcagtcaccggcaga

SEQ ID NO: 5298 - RNA, 132 nt, synthetic construct
  source 1..132: mol_type = other RNA
ggcccagactgagcacgtgagttttagagctagaaatagcaagttaaaataaggctagtccgttatcaacttgaaaaagtggcaccgagtcggtgcttcctctgccatcaaagcgtgctcagtcacggcaga

SEQ ID NO: 5299 - RNA, 136 nt, synthetic construct
  source 1..136: mol_type = other RNA
ggcccagactgagcacgtgagttttagagctagaaatagcaagttaaaataaggctagtccgttatcaacttgaaaaagtggcaccgagtcggtgcttcctctgccatcaaagcgtgctcagtctacacctggcag

SEQ ID NO: 5300 - RNA, 136 nt, synthetic construct
  source 1..136: mol_type = other RNA
ggcccagactgagcacgtgagttttagagctagaaatagcaagttaaaataaggctagtccgttatcaacttgaaaaagtggcaccgagtcggtgcttcctctgccatcaaagcgtgctcagtcccggcctggcag

SEQ ID NO: 5301 - RNA, 136 nt, synthetic construct
  source 1..136: mol_type = other RNA
ggcccagactgagcacgtgagttttagagctagaaatagcaagttaaaataaggctagtccgttatcaacttgaaaaagtggcaccgagtcggtgcttcctctgccatcaaagcgtgctcagtcccagtcatggca

SEQ ID NO: 5302 - RNA, 136 nt, synthetic construct
  source 1..136: mol_type = other RNA
ggcccagactgagcacgtgagttttagagctagaaatagcaagttaaaataaggctagtccgttatcaacttgaaaaagtggcaccgagtcggtgcttcctctgccatcaaagcgtgctcagtccccactatggca

SEQ ID NO: 5303 - RNA, 136 nt, synthetic construct
  source 1..136: mol_type = other RNA
ggcccagactgagcacgtgagttttagagctagaaatagcaagttaaaataaggctagtccgttatcaacttgaaaaagtggcaccgagtcggtgcttcctctgccatcaaagcgtgctcagtcccattcgatggc

SEQ ID NO: 5304 - RNA, 136 nt, synthetic construct
  source 1..136: mol_type = other RNA
ggcccagactgagcacgtgagttttagagctagaaatagcaagttaaaataaggctagtccgttatcaacttgaaaaagtggcaccgagtcggtgcttcctctgccatcaaagcgtgctcagtcaatcacgatggc

SEQ ID NO: 5305 - RNA, 135 nt, synthetic construct
  source 1..135: mol_type = other RNA
ggcccagactgagcacgtgagttttagagctagaaatagcaagttaaaataaggctagtccgttatcaacttgaaaaagtggcaccgagtcggtgcttcctctgccatcaaagcgtgctcagtctaacctgatgg

SEQ ID NO: 5306 - RNA, 135 nt, synthetic construct
  source 1..135: mol_type = other RNA
ggcccagactgagcacgtgagttttagagctagaaatagcaagttaaaataaggctagtccgttatcaacttgaaaaagtggcaccgagtcggtgcttcctctgccatcaaagcgtgctcagtctagactgatgg

SEQ ID NO: 5307 - RNA, 134 nt, synthetic construct
  source 1..134: mol_type = other RNA
ggcccagactgagcacgtgagttttagagctagaaatagcaagttaaaataaggctagtccgttatcaacttgaaaaagtggcaccgagtcggtgcttcctctgccatcaaagcgtgctcagtccaacttgatg

SEQ ID NO: 5308 - RNA, 136 nt, synthetic construct
  source 1..136: mol_type = other RNA
ggcccagactgagcacgtgagttttagagctagaaatagcaagttaaaataaggctagtccgttatcaacttgaaaaagtggcaccgagtcggtgcttcctctgccatcaaagcgtgctcagtctaattcttgatg

SEQ ID NO: 5309 - RNA, 136 nt, synthetic construct
  source 1..136: mol_type = other RNA
ggcccagactgagcacgtgagttttagagctagaaatagcaagttaaaataaggctagtccgttatcaacttgaaaaagtggcaccgagtcggtgcttcctctgccatcaaagcgtgctcagtctctaatacgctt

SEQ ID NO: 5310 - RNA, 136 nt, synthetic construct
  source 1..136: mol_type = other RNA
ggcccagactgagcacgtgagttttagagctagaaatagcaagttaaaataaggctagtccgttatcaacttgaaaaagtggcaccgagtcggtgcttcctctgccatcaaagcgtgctcagtctaatatacgctt

SEQ ID NO: 5311 - RNA, 136 nt, synthetic construct
  source 1..136: mol_type = other RNA
ggcccagactgagcacgtgagttttagagctagaaatagcaagttaaaataaggctagtccgttatcaacttgaaaaagtggcaccgagtcggtgcttcctctgccatcaaagcgtgctcagtcaaacctcacgct

SEQ ID NO: 5312 - RNA, 136 nt, synthetic construct
  source 1..136: mol_type = other RNA
ggcccagactgagcacgtgagttttagagctagaaatagcaagttaaaataaggctagtccgttatcaacttgaaaaagtggcaccgagtcggtgcttcctctgccatcaaagcgtgctcagtcgtccctcacgct

SEQ ID NO: 5313 - RNA, 136 nt, synthetic construct
  source 1..136: mol_type = other RNA
ggcccagactgagcacgtgagttttagagctagaaatagcaagttaaaataaggctagtccgttatcaacttgaaaaagtggcaccgagtcggtgcttcctctgccatcaaagcgtgctcagtcaccactgcacgc

SEQ ID NO: 5314 - RNA, 136 nt, synthetic construct
  source 1..136: mol_type = other RNA
ggcccagactgagcacgtgagttttagagctagaaatagcaagttaaaataaggctagtccgttatcaacttgaaaaagtggcaccgagtcggtgcttcctctgccatcaaagcgtgctcagtcgccactgcacgc

SEQ ID NO: 5315 - RNA, 136 nt, synthetic construct
  source 1..136: mol_type = other RNA
ggcccagactgagcacgtgagttttagagctagaaatagcaagttaaaataaggctagtccgttatcaacttgaaaaagtggcaccgagtcggtgcttcctctgccatcaaagcgtgctcagtctctattagcacg

SEQ ID NO: 5316 - RNA, 136 nt, synthetic construct
  source 1..136: mol_type = other RNA
ggcccagactgagcacgtgagttttagagctagaaatagcaagttaaaataaggctagtccgttatcaacttgaaaaagtggcaccgagtcggtgcttcctctgccatcaaagcgtgctcagtcgctattagcacg

SEQ ID NO: 5317 - RNA, 136 nt, synthetic construct
  source 1..136: mol_type = other RNA
ggcccagactgagcacgtgagttttagagctagaaatagcaagttaaaataaggctagtccgttatcaacttgaaaaagtggcaccgagtcggtgcttcctctgccatcaaagcgtgctcagtcgttggggagcac

SEQ ID NO: 5318 - RNA, 136 nt, synthetic construct
  source 1..136: mol_type = other RNA
ggcccagactgagcacgtgagttttagagctagaaatagcaagttaaaataaggctagtccgttatcaacttgaaaaagtggcaccgagtcggtgcttcctctgccatcaaagcgtgctcagtcgccggggagcac

SEQ ID NO: 5319 - RNA, 136 nt, synthetic construct
  source 1..136: mol_type = other RNA
ggcccagactgagcacgtgagttttagagctagaaatagcaagttaaaataaggctagtccgttatcaacttgaaaaagtggcaccgagtcggtgcttcctctgccatcaaagcgtgctcagtctacagttgagca

SEQ ID NO: 5320 - RNA, 136 nt, synthetic construct
  source 1..136: mol_type = other RNA
ggcccagactgagcacgtgagttttagagctagaaatagcaagttaaaataaggctagtccgttatcaacttgaaaaagtggcaccgagtcggtgcttcctctgccatcaaagcgtgctcagtcccatgttgagca

SEQ ID NO: 5321 - RNA, 133 nt, synthetic construct
  source 1..133: mol_type = other RNA
ggcccagactgagcacgtgagttttagagctagaaatagcaagttaaaataaggctagtccgttatcaacttgaaaaagtggcaccgagtcggtgcttcctctgccatcaaagcgtgctcagtctcactgagc

SEQ ID NO: 5322 - RNA, 133 nt, synthetic construct
  source 1..133: mol_type = other RNA
ggcccagactgagcacgtgagttttagagctagaaatagcaagttaaaataaggctagtccgttatcaacttgaaaaagtggcaccgagtcggtgcttcctctgccatcaaagcgtgctcagtcgaactgagc

SEQ ID NO: 5323 - RNA, 136 nt, synthetic construct
  source 1..136: mol_type = other RNA
ggcccagactgagcacgtgagttttagagctagaaatagcaagttaaaataaggctagtccgttatcaacttgaaaaagtggcaccgagtcggtgcttcctctgccatcaaagcgtgctcagtcgaattcactgag

SEQ ID NO: 5324 - RNA, 136 nt, synthetic construct
  source 1..136: mol_type = other RNA
ggcccagactgagcacgtgagttttagagctagaaatagcaagttaaaataaggctagtccgttatcaacttgaaaaagtggcaccgagtcggtgcttcctctgccatcaaagcgtgctcagtcgacatcactgag

SEQ ID NO: 5325 - RNA, 135 nt, synthetic construct
  source 1..135: mol_type = other RNA
ggcccagactgagcacgtgagttttagagctagaaatagcaagttaaaataaggctagtccgttatcaacttgaaaaagtggcaccgagtcggtgcttcctctgccatcaaagcgtgctcagtcttcaagactga

SEQ ID NO: 5326 - RNA, 135 nt, synthetic construct
  source 1..135: mol_type = other RNA
ggcccagactgagcacgtgagttttagagctagaaatagcaagttaaaataaggctagtccgttatcaacttgaaaaagtggcaccgagtcggtgcttcctctgccatcaaagcgtgctcagtctaccggactga

SEQ ID NO: 5327 - RNA, 136 nt, synthetic construct
  source 1..136: mol_type = other RNA
ggcccagactgagcacgtgagttttagagctagaaatagcaagttaaaataaggctagtccgttatcaacttgaaaaagtggcaccgagtcggtgcttcctctgccatcaaagcgtgctcagtcccttcagaggaa

SEQ ID NO: 5328 - RNA, 136 nt, synthetic construct
  source 1..136: mol_type = other RNA
ggcccagactgagcacgtgagttttagagctagaaatagcaagttaaaataaggctagtccgttatcaacttgaaaaagtggcaccgagtcggtgcttcctctgccatcaaagcgtgctcagtcacatcagaggaa

SEQ ID NO: 5329 - RNA, 135 nt, synthetic construct
  source 1..135: mol_type = other RNA
ggcccagactgagcacgtgagttttagagctagaaatagcaagttaaaataaggctagtccgttatcaacttgaaaaagtggcaccgagtcggtgcttcctctgccatcaaagcgtgctcagtccttgcagagga

SEQ ID NO: 5330 - RNA, 135 nt, synthetic construct
  source 1..135: mol_type = other RNA
ggcccagactgagcacgtgagttttagagctagaaatagcaagttaaaataaggctagtccgttatcaacttgaaaaagtggcaccgagtcggtgcttcctctgccatcaaagcgtgctcagtccacgcagagga

SEQ ID NO: 5331 - RNA, 135 nt, synthetic construct
  source 1..135: mol_type = other RNA
ggcccagactgagcacgtgagttttagagctagaaatagcaagttaaaataaggctagtccgttatcaacttgaaaaagtggcaccgagtcggtgcttcctctgccatcaaagcgtgctcagtcaccggcagagg

SEQ ID NO: 5332 - RNA, 134 nt, synthetic construct
  source 1..134: mol_type = other RNA
ggcccagactgagcacgtgagttttagagctagaaatagcaagttaaaataaggctagtccgttatcaacttgaaaaagtggcaccgagtcggtgcttcctctgccatcaaagcgtgctcagtcacggcagagg

SEQ ID NO: 5333 - RNA, 138 nt, synthetic construct
  source 1..138: mol_type = other RNA
ggcccagactgagcacgtgagttttagagctagaaatagcaagttaaaataaggctagtccgttatcaacttgaaaaagtggcaccgagtcggtgcttcctctgccatcaaagcgtgctcagtccccacctggcagag

SEQ ID NO: 5334 - RNA, 138 nt, synthetic construct
  source 1..138: mol_type = other RNA
ggcccagactgagcacgtgagttttagagctagaaatagcaagttaaaataaggctagtccgttatcaacttgaaaaagtggcaccgagtcggtgcttcctctgccatcaaagcgtgctcagtctaacactggcagag

SEQ ID NO: 5335 - RNA, 138 nt, synthetic construct
  source 1..138: mol_type = other RNA
ggcccagactgagcacgtgagttttagagctagaaatagcaagttaaaataaggctagtccgttatcaacttgaaaaagtggcaccgagtcggtgcttcctctgccatcaaagcgtgctcagtcccagtcatggcaga

SEQ ID NO: 5336 - RNA, 138 nt, synthetic construct
  source 1..138: mol_type = other RNA
ggcccagactgagcacgtgagttttagagctagaaatagcaagttaaaataaggctagtccgttatcaacttgaaaaagtggcaccgagtcggtgcttcctctgccatcaaagcgtgctcagtccccactatggcaga

SEQ ID NO: 5337 - RNA, 138 nt, synthetic construct
  source 1..138: mol_type = other RNA
ggcccagactgagcacgtgagttttagagctagaaatagcaagttaaaataaggctagtccgttatcaacttgaaaaagtggcaccgagtcggtgcttcctctgccatcaaagcgtgctcagtctattgagatggcag

SEQ ID NO: 5338 - RNA, 138 nt, synthetic construct
  source 1..138: mol_type = other RNA
ggcccagactgagcacgtgagttttagagctagaaatagcaagttaaaataaggctagtccgttatcaacttgaaaaagtggcaccgagtcggtgcttcctctgccatcaaagcgtgctcagtcccattcgatggcag

SEQ ID NO: 5339 - RNA, 137 nt, synthetic construct
  source 1..137: mol_type = other RNA
ggcccagactgagcacgtgagttttagagctagaaatagcaagttaaaataaggctagtccgttatcaacttgaaaaagtggcaccgagtcggtgcttcctctgccatcaaagcgtgctcagtccaacctgatggca

SEQ ID NO: 5340 - RNA, 137 nt, synthetic construct
  source 1..137: mol_type = other RNA
ggcccagactgagcacgtgagttttagagctagaaatagcaagttaaaataaggctagtccgttatcaacttgaaaaagtggcaccgagtcggtgcttcctctgccatcaaagcgtgctcagtctagactgatggca

SEQ ID NO: 5341 - RNA, 138 nt, synthetic construct
  source 1..138: mol_type = other RNA
ggcccagactgagcacgtgagttttagagctagaaatagcaagttaaaataaggctagtccgttatcaacttgaaaaagtggcaccgagtcggtgcttcctctgccatcaaagcgtgctcagtctaatccttgatggc

SEQ ID NO: 5342 - RNA, 136 nt, synthetic construct
  source 1..136: mol_type = other RNA
ggcccagactgagcacgtgagttttagagctagaaatagcaagttaaaataaggctagtccgttatcaacttgaaaaagtggcaccgagtcggtgcttcctctgccatcaaagcgtgctcagtccaacttgatggc

SEQ ID NO: 5343 - RNA, 138 nt, synthetic construct
  source 1..138: mol_type = other RNA
ggcccagactgagcacgtgagttttagagctagaaatagcaagttaaaataaggctagtccgttatcaacttgaaaaagtggcaccgagtcggtgcttcctctgccatcaaagcgtgctcagtcgtcactgcacgctt

SEQ ID NO: 5344 - RNA, 138 nt, synthetic construct
  source 1..138: mol_type = other RNA
ggcccagactgagcacgtgagttttagagctagaaatagcaagttaaaataaggctagtccgttatcaacttgaaaaagtggcaccgagtcggtgcttcctctgccatcaaagcgtgctcagtcttcactgcacgctt

SEQ ID NO: 5345 - RNA, 138 nt, synthetic construct
  source 1..138: mol_type = other RNA
ggcccagactgagcacgtgagttttagagctagaaatagcaagttaaaataaggctagtccgttatcaacttgaaaaagtggcaccgagtcggtgcttcctctgccatcaaagcgtgctcagtctctattagcacgct

SEQ ID NO: 5346 - RNA, 138 nt, synthetic construct
  source 1..138: mol_type = other RNA
ggcccagactgagcacgtgagttttagagctagaaatagcaagttaaaataaggctagtccgttatcaacttgaaaaagtggcaccgagtcggtgcttcctctgccatcaaagcgtgctcagtctatattagcacgct

SEQ ID NO: 5347 - RNA, 138 nt, synthetic construct
  source 1..138: mol_type = other RNA
ggcccagactgagcacgtgagttttagagctagaaatagcaagttaaaataaggctagtccgttatcaacttgaaaaagtggcaccgagtcggtgcttcctctgccatcaaagcgtgctcagtcgacggggagcacgc

SEQ ID NO: 5348 - RNA, 138 nt, synthetic construct
  source 1..138: mol_type = other RNA
ggcccagactgagcacgtgagttttagagctagaaatagcaagttaaaataaggctagtccgttatcaacttgaaaaagtggcaccgagtcggtgcttcctctgccatcaaagcgtgctcagtcgatggggagcacgc

SEQ ID NO: 5349 - RNA, 138 nt, synthetic construct
  source 1..138: mol_type = other RNA
ggcccagactgagcacgtgagttttagagctagaaatagcaagttaaaataaggctagtccgttatcaacttgaaaaagtggcaccgagtcggtgcttcctctgccatcaaagcgtgctcagtccaaagttgagcacg

SEQ ID NO: 5350 - RNA, 138 nt, synthetic construct
  source 1..138: mol_type = other RNA
ggcccagactgagcacgtgagttttagagctagaaatagcaagttaaaataaggctagtccgttatcaacttgaaaaagtggcaccgagtcggtgcttcctctgccatcaaagcgtgctcagtcccttgttgagcacg

SEQ ID NO: 5351 - RNA, 135 nt, synthetic construct
  source 1..135: mol_type = other RNA
ggcccagactgagcacgtgagttttagagctagaaatagcaagttaaaataaggctagtccgttatcaacttgaaaaagtggcaccgagtcggtgcttcctctgccatcaaagcgtgctcagtcaaactgagcac

SEQ ID NO: 5352 - RNA, 135 nt, synthetic construct
  source 1..135: mol_type = other RNA
ggcccagactgagcacgtgagttttagagctagaaatagcaagttaaaataaggctagtccgttatcaacttgaaaaagtggcaccgagtcggtgcttcctctgccatcaaagcgtgctcagtctaactgagcac

SEQ ID NO: 5353 - RNA, 138 nt, synthetic construct
  source 1..138: mol_type = other RNA
ggcccagactgagcacgtgagttttagagctagaaatagcaagttaaaataaggctagtccgttatcaacttgaaaaagtggcaccgagtcggtgcttcctctgccatcaaagcgtgctcagtcgaaaccactgagca

SEQ ID NO: 5354 - RNA, 138 nt, synthetic construct
  source 1..138: mol_type = other RNA
ggcccagactgagcacgtgagttttagagctagaaatagcaagttaaaataaggctagtccgttatcaacttgaaaaagtggcaccgagtcggtgcttcctctgccatcaaagcgtgctcagtcgaatccactgagca

SEQ ID NO: 5355 - RNA, 137 nt, synthetic construct
  source 1..137: mol_type = other RNA
ggcccagactgagcacgtgagttttagagctagaaatagcaagttaaaataaggctagtccgttatcaacttgaaaaagtggcaccgagtcggtgcttcctctgccatcaaagcgtgctcagtcttccagactgagc

SEQ ID NO: 5356 - RNA, 137 nt, synthetic construct
  source 1..137: mol_type = other RNA
ggcccagactgagcacgtgagttttagagctagaaatagcaagttaaaataaggctagtccgttatcaacttgaaaaagtggcaccgagtcggtgcttcctctgccatcaaagcgtgctcagtcaacttgactgagc

SEQ ID NO: 5357 - RNA, 123 nt, synthetic construct
  source 1..123: mol_type = other RNA
gagtccgagcagaagaagaagttttagagctagaaatagcaagttaaaataaggctagtccgttatcaacttgaaaaagtggcaccgagtcggtgcgatgggagcccttgttcttctgctcgg

SEQ ID NO: 5358 - RNA, 133 nt, synthetic construct
  source 1..133: mol_type = other RNA
gagtccgagcagaagaagaagttttagagctagaaatagcaagttaaaataaggctagtccgttatcaacttgaaaaagtggcaccgagtcggtgcgatgggagcccttgttcttctgctcggtagtggcatc

SEQ ID NO: 5359 - RNA, 133 nt, synthetic construct
  source 1..133: mol_type = other RNA
gagtccgagcagaagaagaagttttagagctagaaatagcaagttaaaataaggctagtccgttatcaacttgaaaaagtggcaccgagtcggtgcgatgggagcccttgttcttctgctcggtacgcacatc

SEQ ID NO: 5360 - RNA, 133 nt, synthetic construct
  source 1..133: mol_type = other RNA
gagtccgagcagaagaagaagttttagagctagaaatagcaagttaaaataaggctagtccgttatcaacttgaaaaagtggcaccgagtcggtgcgatgggagcccttgttcttctgctcggtaagatccat

SEQ ID NO: 5361 - RNA, 133 nt, synthetic construct
  source 1..133: mol_type = other RNA
gagtccgagcagaagaagaagttttagagctagaaatagcaagttaaaataaggctagtccgttatcaacttgaaaaagtggcaccgagtcggtgcgatgggagcccttgttcttctgctcggtaaaatccat

SEQ ID NO: 5362 - RNA, 133 nt, synthetic construct
  source 1..133: mol_type = other RNA
gagtccgagcagaagaagaagttttagagctagaaatagcaagttaaaataaggctagtccgttatcaacttgaaaaagtggcaccgagtcggtgcgatgggagcccttgttcttctgctcggtataggccca

SEQ ID NO: 5363 - RNA, 132 nt, synthetic construct
  source 1..132: mol_type = other RNA
gagtccgagcagaagaagaagttttagagctagaaatagcaagttaaaataaggctagtccgttatcaacttgaaaaagtggcaccgagtcggtgcgatgggagcccttgttcttctgctcggtagaaccca

SEQ ID NO: 5364 - RNA, 133 nt, synthetic construct
  source 1..133: mol_type = other RNA
gagtccgagcagaagaagaagttttagagctagaaatagcaagttaaaataaggctagtccgttatcaacttgaaaaagtggcaccgagtcggtgcgatgggagcccttgttcttctgctcggtacaattccc

SEQ ID NO: 5365 - RNA, 133 nt, synthetic construct
  source 1..133: mol_type = other RNA
gagtccgagcagaagaagaagttttagagctagaaatagcaagttaaaataaggctagtccgttatcaacttgaaaaagtggcaccgagtcggtgcgatgggagcccttgttcttctgctcggtataagtccc

SEQ ID NO: 5366 - RNA, 133 nt, synthetic construct
  source 1..133: mol_type = other RNA
gagtccgagcagaagaagaagttttagagctagaaatagcaagttaaaataaggctagtccgttatcaacttgaaaaagtggcaccgagtcggtgcgatgggagcccttgttcttctgctcggttagaactcc

SEQ ID NO: 5367 - RNA, 133 nt, synthetic construct
  source 1..133: mol_type = other RNA
gagtccgagcagaagaagaagttttagagctagaaatagcaagttaaaataaggctagtccgttatcaacttgaaaaagtggcaccgagtcggtgcgatgggagcccttgttcttctgctcggcacactctcc

SEQ ID NO: 5368 - RNA, 133 nt, synthetic construct
  source 1..133: mol_type = other RNA
gagtccgagcagaagaagaagttttagagctagaaatagcaagttaaaataaggctagtccgttatcaacttgaaaaagtggcaccgagtcggtgcgatgggagcccttgttcttctgctcggctagaagctc

SEQ ID NO: 5369 - RNA, 133 nt, synthetic construct
  source 1..133: mol_type = other RNA
gagtccgagcagaagaagaagttttagagctagaaatagcaagttaaaataaggctagtccgttatcaacttgaaaaagtggcaccgagtcggtgcgatgggagcccttgttcttctgctcggcatgaagctc

SEQ ID NO: 5370 - RNA, 133 nt, synthetic construct
  source 1..133: mol_type = other RNA
gagtccgagcagaagaagaagttttagagctagaaatagcaagttaaaataaggctagtccgttatcaacttgaaaaagtggcaccgagtcggtgcgatgggagcccttgttcttctgctcggttgtaaggct

SEQ ID NO: 5371 - RNA, 133 nt, synthetic construct
  source 1..133: mol_type = other RNA
gagtccgagcagaagaagaagttttagagctagaaatagcaagttaaaataaggctagtccgttatcaacttgaaaaagtggcaccgagtcggtgcgatgggagcccttgttcttctgctcggtattaaggct

SEQ ID NO: 5372 - RNA, 130 nt, synthetic construct
  source 1..130: mol_type = other RNA
gagtccgagcagaagaagaagttttagagctagaaatagcaagttaaaataaggctagtccgttatcaacttgaaaaagtggcaccgagtcggtgcgatgggagcccttgttcttctgctcggtgcgggc

SEQ ID NO: 5373 - RNA, 133 nt, synthetic construct
  source 1..133: mol_type = other RNA
gagtccgagcagaagaagaagttttagagctagaaatagcaagttaaaataaggctagtccgttatcaacttgaaaaagtggcaccgagtcggtgcgatgggagcccttgttcttctgctcggctgtcggggc

SEQ ID NO: 5374 - RNA, 133 nt, synthetic construct
  source 1..133: mol_type = other RNA
gagtccgagcagaagaagaagttttagagctagaaatagcaagttaaaataaggctagtccgttatcaacttgaaaaagtggcaccgagtcggtgcgatgggagcccttgttcttctgctcggctattcaggg

SEQ ID NO: 5375 - RNA, 132 nt, synthetic construct
  source 1..132: mol_type = other RNA
gagtccgagcagaagaagaagttttagagctagaaatagcaagttaaaataaggctagtccgttatcaacttgaaaaagtggcaccgagtcggtgcgatgggagcccttgttcttctgctcggtattcaggg

SEQ ID NO: 5376 - RNA, 131 nt, synthetic construct
  source 1..131: mol_type = other RNA
gagtccgagcagaagaagaagttttagagctagaaatagcaagttaaaataaggctagtccgttatcaacttgaaaaagtggcaccgagtcggtgcgatgggagcccttgttcttctgctcggtaaacaag

SEQ ID NO: 5377 - RNA, 133 nt, synthetic construct
  source 1..133: mol_type = other RNA
gagtccgagcagaagaagaagttttagagctagaaatagcaagttaaaataaggctagtccgttatcaacttgaaaaagtggcaccgagtcggtgcgatgggagcccttgttcttctgctcggttagtacaag

SEQ ID NO: 5378 - RNA, 133 nt, synthetic construct
  source 1..133: mol_type = other RNA
gagtccgagcagaagaagaagttttagagctagaaatagcaagttaaaataaggctagtccgttatcaacttgaaaaagtggcaccgagtcggtgcgatgggagcccttgttcttctgctcggtataagacaa

SEQ ID NO: 5379 - RNA, 133 nt, synthetic construct
  source 1..133: mol_type = other RNA
gagtccgagcagaagaagaagttttagagctagaaatagcaagttaaaataaggctagtccgttatcaacttgaaaaagtggcaccgagtcggtgcgatgggagcccttgttcttctgctcggtaaaagacaa

SEQ ID NO: 5380 - RNA, 133 nt, synthetic construct
  source 1..133: mol_type = other RNA
gagtccgagcagaagaagaagttttagagctagaaatagcaagttaaaataaggctagtccgttatcaacttgaaaaagtggcaccgagtcggtgcgatgggagcccttgttcttctgctcggttaggaaaca

SEQ ID NO: 5381 - RNA, 133 nt, synthetic construct
  source 1..133: mol_type = other RNA
gagtccgagcagaagaagaagttttagagctagaaatagcaagttaaaataaggctagtccgttatcaacttgaaaaagtggcaccgagtcggtgcgatgggagcccttgttcttctgctcggtaaggaaaca

SEQ ID NO: 5382 - RNA, 133 nt, synthetic construct
  source 1..133: mol_type = other RNA
gagtccgagcagaagaagaagttttagagctagaaatagcaagttaaaataaggctagtccgttatcaacttgaaaaagtggcaccgagtcggtgcgatgggagcccttgttcttctgctcggttaaaggaac

SEQ ID NO: 5383 - RNA, 133 nt, synthetic construct
  source 1..133: mol_type = other RNA
gagtccgagcagaagaagaagttttagagctagaaatagcaagttaaaataaggctagtccgttatcaacttgaaaaagtggcaccgagtcggtgcgatgggagcccttgttcttctgctcggttataggaac

SEQ ID NO: 5384 - RNA, 131 nt, synthetic construct
  source 1..131: mol_type = other RNA
gagtccgagcagaagaagaagttttagagctagaaatagcaagttaaaataaggctagtccgttatcaacttgaaaaagtggcaccgagtcggtgcgatgggagcccttgttcttctgctcggtataagaa

SEQ ID NO: 5385 - RNA, 131 nt, synthetic construct
  source 1..131: mol_type = other RNA
gagtccgagcagaagaagaagttttagagctagaaatagcaagttaaaataaggctagtccgttatcaacttgaaaaagtggcaccgagtcggtgcgatgggagcccttgttcttctgctcggtacaagaa

SEQ ID NO: 5386 - RNA, 133 nt, synthetic construct
  source 1..133: mol_type = other RNA
gagtccgagcagaagaagaagttttagagctagaaatagcaagttaaaataaggctagtccgttatcaacttgaaaaagtggcaccgagtcggtgcgatgggagcccttgttcttctgctcggttactgaaga

SEQ ID NO: 5387 - RNA, 133 nt, synthetic construct
  source 1..133: mol_type = other RNA
gagtccgagcagaagaagaagttttagagctagaaatagcaagttaaaataaggctagtccgttatcaacttgaaaaagtggcaccgagtcggtgcgatgggagcccttgttcttctgctcggttgatgaaga

SEQ ID NO: 5388 - RNA, 132 nt, synthetic construct
  source 1..132: mol_type = other RNA
gagtccgagcagaagaagaagttttagagctagaaatagcaagttaaaataaggctagtccgttatcaacttgaaaaagtggcaccgagtcggtgcgatgggagcccttgttcttctgctcggttaaagaag

SEQ ID NO: 5389 - RNA, 132 nt, synthetic construct
  source 1..132: mol_type = other RNA
gagtccgagcagaagaagaagttttagagctagaaatagcaagttaaaataaggctagtccgttatcaacttgaaaaagtggcaccgagtcggtgcgatgggagcccttgttcttctgctcggtataagaag

SEQ ID NO: 5390 - RNA, 133 nt, synthetic construct
  source 1..133: mol_type = other RNA
gagtccgagcagaagaagaagttttagagctagaaatagcaagttaaaataaggctagtccgttatcaacttgaaaaagtggcaccgagtcggtgcgatgggagcccttgttcttctgctcggttagaaagaa

SEQ ID NO: 5391 - RNA, 133 nt, synthetic construct
  source 1..133: mol_type = other RNA
gagtccgagcagaagaagaagttttagagctagaaatagcaagttaaaataaggctagtccgttatcaacttgaaaaagtggcaccgagtcggtgcgatgggagcccttgttcttctgctcggttagtaagaa

SEQ ID NO: 5392 - RNA, 132 nt, synthetic construct
  source 1..132: mol_type = other RNA
gagtccgagcagaagaagaagttttagagctagaaatagcaagttaaaataaggctagtccgttatcaacttgaaaaagtggcaccgagtcggtgcgatgggagcccttgttcttctgctcggcttgacaga

SEQ ID NO: 5393 - RNA, 132 nt, synthetic construct
  source 1..132: mol_type = other RNA
gagtccgagcagaagaagaagttttagagctagaaatagcaagttaaaataaggctagtccgttatcaacttgaaaaagtggcaccgagtcggtgcgatgggagcccttgttcttctgctcgggatgacaga

SEQ ID NO: 5394 - RNA, 133 nt, synthetic construct
  source 1..133: mol_type = other RNA
gagtccgagcagaagaagaagttttagagctagaaatagcaagttaaaataaggctagtccgttatcaacttgaaaaagtggcaccgagtcggtgcgatgggagcccttgttcttctgctcgggacactgcag

SEQ ID NO: 5395 - RNA, 133 nt, synthetic construct
  source 1..133: mol_type = other RNA
gagtccgagcagaagaagaagttttagagctagaaatagcaagttaaaataaggctagtccgttatcaacttgaaaaagtggcaccgagtcggtgcgatgggagcccttgttcttctgctcgggatactgcag

SEQ ID NO: 5396 - RNA, 133 nt, synthetic construct
  source 1..133: mol_type = other RNA
gagtccgagcagaagaagaagttttagagctagaaatagcaagttaaaataaggctagtccgttatcaacttgaaaaagtggcaccgagtcggtgcgatgggagcccttgttcttctgctcggttaatcagca

SEQ ID NO: 5397 - RNA, 133 nt, synthetic construct
  source 1..133: mol_type = other RNA
gagtccgagcagaagaagaagttttagagctagaaatagcaagttaaaataaggctagtccgttatcaacttgaaaaagtggcaccgagtcggtgcgatgggagcccttgttcttctgctcggttgatcagca

SEQ ID NO: 5398 - RNA, 132 nt, synthetic construct
  source 1..132: mol_type = other RNA
gagtccgagcagaagaagaagttttagagctagaaatagcaagttaaaataaggctagtccgttatcaacttgaaaaagtggcaccgagtcggtgcgatgggagcccttgttcttctgctcggcgcttgagc

SEQ ID NO: 5399 - RNA, 132 nt, synthetic construct
  source 1..132: mol_type = other RNA
gagtccgagcagaagaagaagttttagagctagaaatagcaagttaaaataaggctagtccgttatcaacttgaaaaagtggcaccgagtcggtgcgatgggagcccttgttcttctgctcggttattgagc

SEQ ID NO: 5400 - RNA, 133 nt, synthetic construct
  source 1..133: mol_type = other RNA
gagtccgagcagaagaagaagttttagagctagaaatagcaagttaaaataaggctagtccgttatcaacttgaaaaagtggcaccgagtcggtgcgatgggagcccttgttcttctgctcggttcggtcgag

SEQ ID NO: 5401 - RNA, 133 nt, synthetic construct
  source 1..133: mol_type = other RNA
gagtccgagcagaagaagaagttttagagctagaaatagcaagttaaaataaggctagtccgttatcaacttgaaaaagtggcaccgagtcggtgcgatgggagcccttgttcttctgctcggcgcgatcgag

SEQ ID NO: 5402 - RNA, 132 nt, synthetic construct
  source 1..132: mol_type = other RNA
gagtccgagcagaagaagaagttttagagctagaaatagcaagttaaaataaggctagtccgttatcaacttgaaaaagtggcaccgagtcggtgcgatgggagcccttgttcttctgctcggtatgaccga

SEQ ID NO: 5403 - RNA, 132 nt, synthetic construct
  source 1..132: mol_type = other RNA
gagtccgagcagaagaagaagttttagagctagaaatagcaagttaaaataaggctagtccgttatcaacttgaaaaagtggcaccgagtcggtgcgatgggagcccttgttcttctgctcggtataaccga

SEQ ID NO: 5404 - RNA, 135 nt, synthetic construct
  source 1..135: mol_type = other RNA
gagtccgagcagaagaagaagttttagagctagaaatagcaagttaaaataaggctagtccgttatcaacttgaaaaagtggcaccgagtcggtgcgatgggagcccttgttcttctgctcggtataggcccatc

SEQ ID NO: 5405 - RNA, 134 nt, synthetic construct
  source 1..134: mol_type = other RNA
gagtccgagcagaagaagaagttttagagctagaaatagcaagttaaaataaggctagtccgttatcaacttgaaaaagtggcaccgagtcggtgcgatgggagcccttgttcttctgctcggtagaacccatc

SEQ ID NO: 5406 - RNA, 135 nt, synthetic construct
  source 1..135: mol_type = other RNA
gagtccgagcagaagaagaagttttagagctagaaatagcaagttaaaataaggctagtccgttatcaacttgaaaaagtggcaccgagtcggtgcgatgggagcccttgttcttctgctcggtacaattcccat

SEQ ID NO: 5407 - RNA, 135 nt, synthetic construct
  source 1..135: mol_type = other RNA
gagtccgagcagaagaagaagttttagagctagaaatagcaagttaaaataaggctagtccgttatcaacttgaaaaagtggcaccgagtcggtgcgatgggagcccttgttcttctgctcggttgaattcccat

SEQ ID NO: 5408 - RNA, 135 nt, synthetic construct
  source 1..135: mol_type = other RNA
gagtccgagcagaagaagaagttttagagctagaaatagcaagttaaaataaggctagtccgttatcaacttgaaaaagtggcaccgagtcggtgcgatgggagcccttgttcttctgctcggctgcaactccca

SEQ ID NO: 5409 - RNA, 135 nt, synthetic construct
  source 1..135: mol_type = other RNA
gagtccgagcagaagaagaagttttagagctagaaatagcaagttaaaataaggctagtccgttatcaacttgaaaaagtggcaccgagtcggtgcgatgggagcccttgttcttctgctcggttgcaactccca

SEQ ID NO: 5410 - RNA, 135 nt, synthetic construct
  source 1..135: mol_type = other RNA
gagtccgagcagaagaagaagttttagagctagaaatagcaagttaaaataaggctagtccgttatcaacttgaaaaagtggcaccgagtcggtgcgatgggagcccttgttcttctgctcggcatgaagctccc

SEQ ID NO: 5411 - RNA, 135 nt, synthetic construct
  source 1..135: mol_type = other RNA
gagtccgagcagaagaagaagttttagagctagaaatagcaagttaaaataaggctagtccgttatcaacttgaaaaagtggcaccgagtcggtgcgatgggagcccttgttcttctgctcggctagaagctccc

SEQ ID NO: 5412 - RNA, 135 nt, synthetic construct
  source 1..135: mol_type = other RNA
gagtccgagcagaagaagaagttttagagctagaaatagcaagttaaaataaggctagtccgttatcaacttgaaaaagtggcaccgagtcggtgcgatgggagcccttgttcttctgctcggctgtcaggctcc

SEQ ID NO: 5413 - RNA, 135 nt, synthetic construct
  source 1..135: mol_type = other RNA
gagtccgagcagaagaagaagttttagagctagaaatagcaagttaaaataaggctagtccgttatcaacttgaaaaagtggcaccgagtcggtgcgatgggagcccttgttcttctgctcggctgttcggctcc

SEQ ID NO: 5414 - RNA, 135 nt, synthetic construct
  source 1..135: mol_type = other RNA
gagtccgagcagaagaagaagttttagagctagaaatagcaagttaaaataaggctagtccgttatcaacttgaaaaagtggcaccgagtcggtgcgatgggagcccttgttcttctgctcggctgttcgggctc

SEQ ID NO: 5415 - RNA, 135 nt, synthetic construct
  source 1..135: mol_type = other RNA
gagtccgagcagaagaagaagttttagagctagaaatagcaagttaaaataaggctagtccgttatcaacttgaaaaagtggcaccgagtcggtgcgatgggagcccttgttcttctgctcggctaaacgggctc

SEQ ID NO: 5416 - RNA, 135 nt, synthetic construct
  source 1..135: mol_type = other RNA
gagtccgagcagaagaagaagttttagagctagaaatagcaagttaaaataaggctagtccgttatcaacttgaaaaagtggcaccgagtcggtgcgatgggagcccttgttcttctgctcggcttgtcagggct

SEQ ID NO: 5417 - RNA, 135 nt, synthetic construct
  source 1..135: mol_type = other RNA
gagtccgagcagaagaagaagttttagagctagaaatagcaagttaaaataaggctagtccgttatcaacttgaaaaagtggcaccgagtcggtgcgatgggagcccttgttcttctgctcggctattcagggct

SEQ ID NO: 5418 - RNA, 134 nt, synthetic construct
  source 1..134: mol_type = other RNA
gagtccgagcagaagaagaagttttagagctagaaatagcaagttaaaataaggctagtccgttatcaacttgaaaaagtggcaccgagtcggtgcgatgggagcccttgttcttctgctcggcttctaagggc

SEQ ID NO: 5419 - RNA, 134 nt, synthetic construct
  source 1..134: mol_type = other RNA
gagtccgagcagaagaagaagttttagagctagaaatagcaagttaaaataaggctagtccgttatcaacttgaaaaagtggcaccgagtcggtgcgatgggagcccttgttcttctgctcggctcgtaagggc

SEQ ID NO: 5420 - RNA, 135 nt, synthetic construct
  source 1..135: mol_type = other RNA
gagtccgagcagaagaagaagttttagagctagaaatagcaagttaaaataaggctagtccgttatcaacttgaaaaagtggcaccgagtcggtgcgatgggagcccttgttcttctgctcggtattcccaaggg

SEQ ID NO: 5421 - RNA, 135 nt, synthetic construct
  source 1..135: mol_type = other RNA
gagtccgagcagaagaagaagttttagagctagaaatagcaagttaaaataaggctagtccgttatcaacttgaaaaagtggcaccgagtcggtgcgatgggagcccttgttcttctgctcggtaatcccaaggg

SEQ ID NO: 5422 - RNA, 134 nt, synthetic construct
  source 1..134: mol_type = other RNA
gagtccgagcagaagaagaagttttagagctagaaatagcaagttaaaataaggctagtccgttatcaacttgaaaaagtggcaccgagtcggtgcgatgggagcccttgttcttctgctcggtacgaaacaag

SEQ ID NO: 5423 - RNA, 135 nt, synthetic construct
  source 1..135: mol_type = other RNA
gagtccgagcagaagaagaagttttagagctagaaatagcaagttaaaataaggctagtccgttatcaacttgaaaaagtggcaccgagtcggtgcgatgggagcccttgttcttctgctcggtatgtaaacaag

SEQ ID NO: 5424 - RNA, 135 nt, synthetic construct
  source 1..135: mol_type = other RNA
gagtccgagcagaagaagaagttttagagctagaaatagcaagttaaaataaggctagtccgttatcaacttgaaaaagtggcaccgagtcggtgcgatgggagcccttgttcttctgctcggttaacggaacaa

SEQ ID NO: 5425 - RNA, 135 nt, synthetic construct
  source 1..135: mol_type = other RNA
gagtccgagcagaagaagaagttttagagctagaaatagcaagttaaaataaggctagtccgttatcaacttgaaaaagtggcaccgagtcggtgcgatgggagcccttgttcttctgctcggtattcggaacaa

SEQ ID NO: 5426 - RNA, 135 nt, synthetic construct
  source 1..135: mol_type = other RNA
gagtccgagcagaagaagaagttttagagctagaaatagcaagttaaaataaggctagtccgttatcaacttgaaaaagtggcaccgagtcggtgcgatgggagcccttgttcttctgctcggttattaagaaca

SEQ ID NO: 5427 - RNA, 135 nt, synthetic construct
  source 1..135: mol_type = other RNA
gagtccgagcagaagaagaagttttagagctagaaatagcaagttaaaataaggctagtccgttatcaacttgaaaaagtggcaccgagtcggtgcgatgggagcccttgttcttctgctcggttaataagaaca

SEQ ID NO: 5428 - RNA, 135 nt, synthetic construct
  source 1..135: mol_type = other RNA
gagtccgagcagaagaagaagttttagagctagaaatagcaagttaaaataaggctagtccgttatcaacttgaaaaagtggcaccgagtcggtgcgatgggagcccttgttcttctgctcggtatacaaagaac

SEQ ID NO: 5429 - RNA, 135 nt, synthetic construct
  source 1..135: mol_type = other RNA
gagtccgagcagaagaagaagttttagagctagaaatagcaagttaaaataaggctagtccgttatcaacttgaaaaagtggcaccgagtcggtgcgatgggagcccttgttcttctgctcggtaaacaaagaac

SEQ ID NO: 5430 - RNA, 134 nt, synthetic construct
  source 1..134: mol_type = other RNA
gagtccgagcagaagaagaagttttagagctagaaatagcaagttaaaataaggctagtccgttatcaacttgaaaaagtggcaccgagtcggtgcgatgggagcccttgttcttctgctcggtacgtgaagaa

SEQ ID NO: 5431 - RNA, 134 nt, synthetic construct
  source 1..134: mol_type = other RNA
gagtccgagcagaagaagaagttttagagctagaaatagcaagttaaaataaggctagtccgttatcaacttgaaaaagtggcaccgagtcggtgcgatgggagcccttgttcttctgctcgggacgtgaagaa

SEQ ID NO: 5432 - RNA, 135 nt, synthetic construct
  source 1..135: mol_type = other RNA
gagtccgagcagaagaagaagttttagagctagaaatagcaagttaaaataaggctagtccgttatcaacttgaaaaagtggcaccgagtcggtgcgatgggagcccttgttcttctgctcggcaatatagaaga

SEQ ID NO: 5433 - RNA, 135 nt, synthetic construct
  source 1..135: mol_type = other RNA
gagtccgagcagaagaagaagttttagagctagaaatagcaagttaaaataaggctagtccgttatcaacttgaaaaagtggcaccgagtcggtgcgatgggagcccttgttcttctgctcggcgaaatagaaga

SEQ ID NO: 5434 - RNA, 134 nt, synthetic construct
  source 1..134: mol_type = other RNA
gagtccgagcagaagaagaagttttagagctagaaatagcaagttaaaataaggctagtccgttatcaacttgaaaaagtggcaccgagtcggtgcgatgggagcccttgttcttctgctcggcgtgacagaag

SEQ ID NO: 5435 - RNA, 134 nt, synthetic construct
  source 1..134: mol_type = other RNA
gagtccgagcagaagaagaagttttagagctagaaatagcaagttaaaataaggctagtccgttatcaacttgaaaaagtggcaccgagtcggtgcgatgggagcccttgttcttctgctcgggatgacagaag

SEQ ID NO: 5436 - RNA, 133 nt, synthetic construct
  source 1..133: mol_type = other RNA
gagtccgagcagaagaagaagttttagagctagaaatagcaagttaaaataaggctagtccgttatcaacttgaaaaagtggcaccgagtcggtgcgatgggagcccttgttcttctgctcggggccagcaga

SEQ ID NO: 5437 - RNA, 133 nt, synthetic construct
  source 1..133: mol_type = other RNA
gagtccgagcagaagaagaagttttagagctagaaatagcaagttaaaataaggctagtccgttatcaacttgaaaaagtggcaccgagtcggtgcgatgggagcccttgttcttctgctcggcgtcagcaga

SEQ ID NO: 5438 - RNA, 134 nt, synthetic construct
  source 1..134: mol_type = other RNA
gagtccgagcagaagaagaagttttagagctagaaatagcaagttaaaataaggctagtccgttatcaacttgaaaaagtggcaccgagtcggtgcgatgggagcccttgttcttctgctcgggggttgagcag

SEQ ID NO: 5439 - RNA, 134 nt, synthetic construct
  source 1..134: mol_type = other RNA
gagtccgagcagaagaagaagttttagagctagaaatagcaagttaaaataaggctagtccgttatcaacttgaaaaagtggcaccgagtcggtgcgatgggagcccttgttcttctgctcgggtattgagcag

SEQ ID NO: 5440 - RNA, 135 nt, synthetic construct
  source 1..135: mol_type = other RNA
gagtccgagcagaagaagaagttttagagctagaaatagcaagttaaaataaggctagtccgttatcaacttgaaaaagtggcaccgagtcggtgcgatgggagcccttgttcttctgctcggttacgtcgagca

SEQ ID NO: 5441 - RNA, 135 nt, synthetic construct
  source 1..135: mol_type = other RNA
gagtccgagcagaagaagaagttttagagctagaaatagcaagttaaaataaggctagtccgttatcaacttgaaaaagtggcaccgagtcggtgcgatgggagcccttgttcttctgctcggcgacatcgagca

SEQ ID NO: 5442 - RNA, 135 nt, synthetic construct
  source 1..135: mol_type = other RNA
gagtccgagcagaagaagaagttttagagctagaaatagcaagttaaaataaggctagtccgttatcaacttgaaaaagtggcaccgagtcggtgcgatgggagcccttgttcttctgctcgggagcgtccgagc

SEQ ID NO: 5443 - RNA, 135 nt, synthetic construct
  source 1..135: mol_type = other RNA
gagtccgagcagaagaagaagttttagagctagaaatagcaagttaaaataaggctagtccgttatcaacttgaaaaagtggcaccgagtcggtgcgatgggagcccttgttcttctgctcgggttactccgagc

SEQ ID NO: 5444 - RNA, 137 nt, synthetic construct
  source 1..137: mol_type = other RNA
gagtccgagcagaagaagaagttttagagctagaaatagcaagttaaaataaggctagtccgttatcaacttgaaaaagtggcaccgagtcggtgcgatgggagcccttgttcttctgctcggctgcaactcccatc

SEQ ID NO: 5445 - RNA, 137 nt, synthetic construct
  source 1..137: mol_type = other RNA
gagtccgagcagaagaagaagttttagagctagaaatagcaagttaaaataaggctagtccgttatcaacttgaaaaagtggcaccgagtcggtgcgatgggagcccttgttcttctgctcggttgcaactcccatc

SEQ ID NO: 5446 - RNA, 137 nt, synthetic construct
  source 1..137: mol_type = other RNA
gagtccgagcagaagaagaagttttagagctagaaatagcaagttaaaataaggctagtccgttatcaacttgaaaaagtggcaccgagtcggtgcgatgggagcccttgttcttctgctcggcatgaagctcccat

SEQ ID NO: 5447 - RNA, 137 nt, synthetic construct
  source 1..137: mol_type = other RNA
gagtccgagcagaagaagaagttttagagctagaaatagcaagttaaaataaggctagtccgttatcaacttgaaaaagtggcaccgagtcggtgcgatgggagcccttgttcttctgctcggctagaagctcccat

SEQ ID NO: 5448 - RNA, 137 nt, synthetic construct
  source 1..137: mol_type = other RNA
gagtccgagcagaagaagaagttttagagctagaaatagcaagttaaaataaggctagtccgttatcaacttgaaaaagtggcaccgagtcggtgcgatgggagcccttgttcttctgctcggctgttcggctccca

SEQ ID NO: 5449 - RNA, 137 nt, synthetic construct
  source 1..137: mol_type = other RNA
gagtccgagcagaagaagaagttttagagctagaaatagcaagttaaaataaggctagtccgttatcaacttgaaaaagtggcaccgagtcggtgcgatgggagcccttgttcttctgctcggctgtcaggctccca

SEQ ID NO: 5450 - RNA, 137 nt, synthetic construct
  source 1..137: mol_type = other RNA
gagtccgagcagaagaagaagttttagagctagaaatagcaagttaaaataaggctagtccgttatcaacttgaaaaagtggcaccgagtcggtgcgatgggagcccttgttcttctgctcggctgttcgggctccc

SEQ ID NO: 5451 - RNA, 137 nt, synthetic construct
  source 1..137: mol_type = other RNA
gagtccgagcagaagaagaagttttagagctagaaatagcaagttaaaataaggctagtccgttatcaacttgaaaaagtggcaccgagtcggtgcgatgggagcccttgttcttctgctcggtgtcccgggctccc

SEQ ID NO: 5452 - RNA, 137 nt, synthetic construct
  source 1..137: mol_type = other RNA
gagtccgagcagaagaagaagttttagagctagaaatagcaagttaaaataaggctagtccgttatcaacttgaaaaagtggcaccgagtcggtgcgatgggagcccttgttcttctgctcggctcttcagggctcc

SEQ ID NO: 5453 - RNA, 137 nt, synthetic construct
  source 1..137: mol_type = other RNA
gagtccgagcagaagaagaagttttagagctagaaatagcaagttaaaataaggctagtccgttatcaacttgaaaaagtggcaccgagtcggtgcgatgggagcccttgttcttctgctcggcttgtcagggctcc

SEQ ID NO: 5454 - RNA, 136 nt, synthetic construct
  source 1..136: mol_type = other RNA
gagtccgagcagaagaagaagttttagagctagaaatagcaagttaaaataaggctagtccgttatcaacttgaaaaagtggcaccgagtcggtgcgatgggagcccttgttcttctgctcggcttgtaagggctc

SEQ ID NO: 5455 - RNA, 136 nt, synthetic construct
  source 1..136: mol_type = other RNA
gagtccgagcagaagaagaagttttagagctagaaatagcaagttaaaataaggctagtccgttatcaacttgaaaaagtggcaccgagtcggtgcgatgggagcccttgttcttctgctcggctcctaagggctc

SEQ ID NO: 5456 - RNA, 137 nt, synthetic construct
  source 1..137: mol_type = other RNA
gagtccgagcagaagaagaagttttagagctagaaatagcaagttaaaataaggctagtccgttatcaacttgaaaaagtggcaccgagtcggtgcgatgggagcccttgttcttctgctcggtattcccaagggct

SEQ ID NO: 5457 - RNA, 137 nt, synthetic construct
  source 1..137: mol_type = other RNA
gagtccgagcagaagaagaagttttagagctagaaatagcaagttaaaataaggctagtccgttatcaacttgaaaaagtggcaccgagtcggtgcgatgggagcccttgttcttctgctcggtactcccaagggct

SEQ ID NO: 5458 - RNA, 137 nt, synthetic construct
  source 1..137: mol_type = other RNA
gagtccgagcagaagaagaagttttagagctagaaatagcaagttaaaataaggctagtccgttatcaacttgaaaaagtggcaccgagtcggtgcgatgggagcccttgttcttctgctcggttacccacaagggc

SEQ ID NO: 5459 - RNA, 137 nt, synthetic construct
  source 1..137: mol_type = other RNA
gagtccgagcagaagaagaagttttagagctagaaatagcaagttaaaataaggctagtccgttatcaacttgaaaaagtggcaccgagtcggtgcgatgggagcccttgttcttctgctcggttccccacaagggc

SEQ ID NO: 5460 - RNA, 136 nt, synthetic construct
  source 1..136: mol_type = other RNA
gagtccgagcagaagaagaagttttagagctagaaatagcaagttaaaataaggctagtccgttatcaacttgaaaaagtggcaccgagtcggtgcgatgggagcccttgttcttctgctcggttcgaaacaaggg

SEQ ID NO: 5461 - RNA, 137 nt, synthetic construct
  source 1..137: mol_type = other RNA
gagtccgagcagaagaagaagttttagagctagaaatagcaagttaaaataaggctagtccgttatcaacttgaaaaagtggcaccgagtcggtgcgatgggagcccttgttcttctgctcggttatccaacaaggg

SEQ ID NO: 5462 - RNA, 137 nt, synthetic construct
  source 1..137: mol_type = other RNA
gagtccgagcagaagaagaagttttagagctagaaatagcaagttaaaataaggctagtccgttatcaacttgaaaaagtggcaccgagtcggtgcgatgggagcccttgttcttctgctcggtataccagaacaag

SEQ ID NO: 5463 - RNA, 137 nt, synthetic construct
  source 1..137: mol_type = other RNA
gagtccgagcagaagaagaagttttagagctagaaatagcaagttaaaataaggctagtccgttatcaacttgaaaaagtggcaccgagtcggtgcgatgggagcccttgttcttctgctcggttaaccagaacaag

SEQ ID NO: 5464 - RNA, 137 nt, synthetic construct
  source 1..137: mol_type = other RNA
gagtccgagcagaagaagaagttttagagctagaaatagcaagttaaaataaggctagtccgttatcaacttgaaaaagtggcaccgagtcggtgcgatgggagcccttgttcttctgctcggtaaacaaagaacaa

SEQ ID NO: 5465 - RNA, 137 nt, synthetic construct
  source 1..137: mol_type = other RNA
gagtccgagcagaagaagaagttttagagctagaaatagcaagttaaaataaggctagtccgttatcaacttgaaaaagtggcaccgagtcggtgcgatgggagcccttgttcttctgctcggtatacaaagaacaa

SEQ ID NO: 5466 - RNA, 136 nt, synthetic construct
  source 1..136: mol_type = other RNA
gagtccgagcagaagaagaagttttagagctagaaatagcaagttaaaataaggctagtccgttatcaacttgaaaaagtggcaccgagtcggtgcgatgggagcccttgttcttctgctcggctcgtgaagaaca

SEQ ID NO: 5467 - RNA, 136 nt, synthetic construct
  source 1..136: mol_type = other RNA
gagtccgagcagaagaagaagttttagagctagaaatagcaagttaaaataaggctagtccgttatcaacttgaaaaagtggcaccgagtcggtgcgatgggagcccttgttcttctgctcggtacgtgaagaaca

SEQ ID NO: 5468 - RNA, 137 nt, synthetic construct
  source 1..137: mol_type = other RNA
gagtccgagcagaagaagaagttttagagctagaaatagcaagttaaaataaggctagtccgttatcaacttgaaaaagtggcaccgagtcggtgcgatgggagcccttgttcttctgctcgggaaaatagaagaac

SEQ ID NO: 5469 - RNA, 137 nt, synthetic construct
  source 1..137: mol_type = other RNA
gagtccgagcagaagaagaagttttagagctagaaatagcaagttaaaataaggctagtccgttatcaacttgaaaaagtggcaccgagtcggtgcgatgggagcccttgttcttctgctcggcaccatagaagaac

SEQ ID NO: 5470 - RNA, 137 nt, synthetic construct
  source 1..137: mol_type = other RNA
gagtccgagcagaagaagaagttttagagctagaaatagcaagttaaaataaggctagtccgttatcaacttgaaaaagtggcaccgagtcggtgcgatgggagcccttgttcttctgctcggtaatctcagaagaa

SEQ ID NO: 5471 - RNA, 137 nt, synthetic construct
  source 1..137: mol_type = other RNA
gagtccgagcagaagaagaagttttagagctagaaatagcaagttaaaataaggctagtccgttatcaacttgaaaaagtggcaccgagtcggtgcgatgggagcccttgttcttctgctcggtgatctcagaagaa

SEQ ID NO: 5472 - RNA, 136 nt, synthetic construct
  source 1..136: mol_type = other RNA
gagtccgagcagaagaagaagttttagagctagaaatagcaagttaaaataaggctagtccgttatcaacttgaaaaagtggcaccgagtcggtgcgatgggagcccttgttcttctgctcggtacccgcagaaga

SEQ ID NO: 5473 - RNA, 136 nt, synthetic construct
  source 1..136: mol_type = other RNA
gagtccgagcagaagaagaagttttagagctagaaatagcaagttaaaataaggctagtccgttatcaacttgaaaaagtggcaccgagtcggtgcgatgggagcccttgttcttctgctcgggagccgcagaaga

SEQ ID NO: 5474 - RNA, 135 nt, synthetic construct
  source 1..135: mol_type = other RNA
gagtccgagcagaagaagaagttttagagctagaaatagcaagttaaaataaggctagtccgttatcaacttgaaaaagtggcaccgagtcggtgcgatgggagcccttgttcttctgctcggtatcagcagaag

SEQ ID NO: 5475 - RNA, 135 nt, synthetic construct
  source 1..135: mol_type = other RNA
gagtccgagcagaagaagaagttttagagctagaaatagcaagttaaaataaggctagtccgttatcaacttgaaaaagtggcaccgagtcggtgcgatgggagcccttgttcttctgctcggcgccagcagaag

SEQ ID NO: 5476 - RNA, 137 nt, synthetic construct
  source 1..137: mol_type = other RNA
gagtccgagcagaagaagaagttttagagctagaaatagcaagttaaaataaggctagtccgttatcaacttgaaaaagtggcaccgagtcggtgcgatgggagcccttgttcttctgctcggtgtggtcgagcaga

SEQ ID NO: 5477 - RNA, 137 nt, synthetic construct
  source 1..137: mol_type = other RNA
gagtccgagcagaagaagaagttttagagctagaaatagcaagttaaaataaggctagtccgttatcaacttgaaaaagtggcaccgagtcggtgcgatgggagcccttgttcttctgctcggcatgatcgagcaga

SEQ ID NO: 5478 - RNA, 137 nt, synthetic construct
  source 1..137: mol_type = other RNA
gagtccgagcagaagaagaagttttagagctagaaatagcaagttaaaataaggctagtccgttatcaacttgaaaaagtggcaccgagtcggtgcgatgggagcccttgttcttctgctcgggtgcctccgagcag

SEQ ID NO: 5479 - RNA, 137 nt, synthetic construct
  source 1..137: mol_type = other RNA
gagtccgagcagaagaagaagttttagagctagaaatagcaagttaaaataaggctagtccgttatcaacttgaaaaagtggcaccgagtcggtgcgatgggagcccttgttcttctgctcgggaacgtccgagcag

SEQ ID NO: 5480 - RNA, 119 nt, synthetic construct
  source 1..119: mol_type = other RNA
gagtccgagcagaagaagaagttttagagctagaaatagcaagttaaaataaggctagtccgttatcaacttgaaaaagtggcaccgagtcggtgcgagcccttcgcattcttctgctc

SEQ ID NO: 5481 - RNA, 129 nt, synthetic construct
  source 1..129: mol_type = other RNA
gagtccgagcagaagaagaagttttagagctagaaatagcaagttaaaataaggctagtccgttatcaacttgaaaaagtggcaccgagtcggtgcgagcccttcgcattcttctgctccatgcagctc

SEQ ID NO: 5482 - RNA, 129 nt, synthetic construct
  source 1..129: mol_type = other RNA
gagtccgagcagaagaagaagttttagagctagaaatagcaagttaaaataaggctagtccgttatcaacttgaaaaagtggcaccgagtcggtgcgagcccttcgcattcttctgctctctgcagctc

SEQ ID NO: 5483 - RNA, 129 nt, synthetic construct
  source 1..129: mol_type = other RNA
gagtccgagcagaagaagaagttttagagctagaaatagcaagttaaaataaggctagtccgttatcaacttgaaaaagtggcaccgagtcggtgcgagcccttcgcattcttctgctcttgtaaggct

SEQ ID NO: 5484 - RNA, 129 nt, synthetic construct
  source 1..129: mol_type = other RNA
gagtccgagcagaagaagaagttttagagctagaaatagcaagttaaaataaggctagtccgttatcaacttgaaaaagtggcaccgagtcggtgcgagcccttcgcattcttctgctctcgcaaggct

SEQ ID NO: 5485 - RNA, 129 nt, synthetic construct
  source 1..129: mol_type = other RNA
gagtccgagcagaagaagaagttttagagctagaaatagcaagttaaaataaggctagtccgttatcaacttgaaaaagtggcaccgagtcggtgcgagcccttcgcattcttctgctccaaagcgggc

SEQ ID NO: 5486 - RNA, 129 nt, synthetic construct
  source 1..129: mol_type = other RNA
gagtccgagcagaagaagaagttttagagctagaaatagcaagttaaaataaggctagtccgttatcaacttgaaaaagtggcaccgagtcggtgcgagcccttcgcattcttctgctcttaagcgggc

SEQ ID NO: 5487 - RNA, 129 nt, synthetic construct
  source 1..129: mol_type = other RNA
gagtccgagcagaagaagaagttttagagctagaaatagcaagttaaaataaggctagtccgttatcaacttgaaaaagtggcaccgagtcggtgcgagcccttcgcattcttctgctcccttgtaggg

SEQ ID NO: 5488 - RNA, 129 nt, synthetic construct
  source 1..129: mol_type = other RNA
gagtccgagcagaagaagaagttttagagctagaaatagcaagttaaaataaggctagtccgttatcaacttgaaaaagtggcaccgagtcggtgcgagcccttcgcattcttctgctcaattgtaggg

SEQ ID NO: 5489 - RNA, 129 nt, synthetic construct
  source 1..129: mol_type = other RNA
gagtccgagcagaagaagaagttttagagctagaaatagcaagttaaaataaggctagtccgttatcaacttgaaaaagtggcaccgagtcggtgcgagcccttcgcattcttctgctccattgtaagg

SEQ ID NO: 5490 - RNA, 129 nt, synthetic construct
  source 1..129: mol_type = other RNA
gagtccgagcagaagaagaagttttagagctagaaatagcaagttaaaataaggctagtccgttatcaacttgaaaaagtggcaccgagtcggtgcgagcccttcgcattcttctgctctattgtaagg

SEQ ID NO: 5491 - RNA, 128 nt, synthetic construct
  source 1..128: mol_type = other RNA
gagtccgagcagaagaagaagttttagagctagaaatagcaagttaaaataaggctagtccgttatcaacttgaaaaagtggcaccgagtcggtgcgagcccttcgcattcttctgctcctatcgaag

SEQ ID NO: 5492 - RNA, 129 nt, synthetic construct
  source 1..129: mol_type = other RNA
gagtccgagcagaagaagaagttttagagctagaaatagcaagttaaaataaggctagtccgttatcaacttgaaaaagtggcaccgagtcggtgcgagcccttcgcattcttctgctcccacacgaag

SEQ ID NO: 5493 - RNA, 129 nt, synthetic construct
  source 1..129: mol_type = other RNA
gagtccgagcagaagaagaagttttagagctagaaatagcaagttaaaataaggctagtccgttatcaacttgaaaaagtggcaccgagtcggtgcgagcccttcgcattcttctgctctagattcgaa

SEQ ID NO: 5494 - RNA, 129 nt, synthetic construct
  source 1..129: mol_type = other RNA
gagtccgagcagaagaagaagttttagagctagaaatagcaagttaaaataaggctagtccgttatcaacttgaaaaagtggcaccgagtcggtgcgagcccttcgcattcttctgctctcaaagcgaa

SEQ ID NO: 5495 - RNA, 129 nt, synthetic construct
  source 1..129: mol_type = other RNA
gagtccgagcagaagaagaagttttagagctagaaatagcaagttaaaataaggctagtccgttatcaacttgaaaaagtggcaccgagtcggtgcgagcccttcgcattcttctgctcttagtagcga

SEQ ID NO: 5496 - RNA, 129 nt, synthetic construct
  source 1..129: mol_type = other RNA
gagtccgagcagaagaagaagttttagagctagaaatagcaagttaaaataaggctagtccgttatcaacttgaaaaagtggcaccgagtcggtgcgagcccttcgcattcttctgctcctagtagcga

SEQ ID NO: 5497 - RNA, 129 nt, synthetic construct
  source 1..129: mol_type = other RNA
gagtccgagcagaagaagaagttttagagctagaaatagcaagttaaaataaggctagtccgttatcaacttgaaaaagtggcaccgagtcggtgcgagcccttcgcattcttctgctccttccatgcg

SEQ ID NO: 5498 - RNA, 129 nt, synthetic construct
  source 1..129: mol_type = other RNA
gagtccgagcagaagaagaagttttagagctagaaatagcaagttaaaataaggctagtccgttatcaacttgaaaaagtggcaccgagtcggtgcgagcccttcgcattcttctgctccaatcatgcg

SEQ ID NO: 5499 - RNA, 127 nt, synthetic construct
  source 1..127: mol_type = other RNA
gagtccgagcagaagaagaagttttagagctagaaatagcaagttaaaataaggctagtccgttatcaacttgaaaaagtggcaccgagtcggtgcgagcccttcgcattcttctgctcctcgatgc

SEQ ID NO: 5500 - RNA, 127 nt, synthetic construct
  source 1..127: mol_type = other RNA
gagtccgagcagaagaagaagttttagagctagaaatagcaagttaaaataaggctagtccgttatcaacttgaaaaagtggcaccgagtcggtgcgagcccttcgcattcttctgctccccgatgc

SEQ ID NO: 5501 - RNA, 129 nt, synthetic construct
  source 1..129: mol_type = other RNA
gagtccgagcagaagaagaagttttagagctagaaatagcaagttaaaataaggctagtccgttatcaacttgaaaaagtggcaccgagtcggtgcgagcccttcgcattcttctgctccatagaaatg

SEQ ID NO: 5502 - RNA, 129 nt, synthetic construct
  source 1..129: mol_type = other RNA
gagtccgagcagaagaagaagttttagagctagaaatagcaagttaaaataaggctagtccgttatcaacttgaaaaagtggcaccgagtcggtgcgagcccttcgcattcttctgctccttagaaatg

SEQ ID NO: 5503 - RNA, 127 nt, synthetic construct
  source 1..127: mol_type = other RNA
gagtccgagcagaagaagaagttttagagctagaaatagcaagttaaaataaggctagtccgttatcaacttgaaaaagtggcaccgagtcggtgcgagcccttcgcattcttctgctcctgagaat

SEQ ID NO: 5504 - RNA, 127 nt, synthetic construct
  source 1..127: mol_type = other RNA
gagtccgagcagaagaagaagttttagagctagaaatagcaagttaaaataaggctagtccgttatcaacttgaaaaagtggcaccgagtcggtgcgagcccttcgcattcttctgctcccgagaat

SEQ ID NO: 5505 - RNA, 129 nt, synthetic construct
  source 1..129: mol_type = other RNA
gagtccgagcagaagaagaagttttagagctagaaatagcaagttaaaataaggctagtccgttatcaacttgaaaaagtggcaccgagtcggtgcgagcccttcgcattcttctgctccacgaaagaa

SEQ ID NO: 5506 - RNA, 129 nt, synthetic construct
  source 1..129: mol_type = other RNA
gagtccgagcagaagaagaagttttagagctagaaatagcaagttaaaataaggctagtccgttatcaacttgaaaaagtggcaccgagtcggtgcgagcccttcgcattcttctgctccaacaaagaa

SEQ ID NO: 5507 - RNA, 129 nt, synthetic construct
  source 1..129: mol_type = other RNA
gagtccgagcagaagaagaagttttagagctagaaatagcaagttaaaataaggctagtccgttatcaacttgaaaaagtggcaccgagtcggtgcgagcccttcgcattcttctgctcccagtaaaga

SEQ ID NO: 5508 - RNA, 129 nt, synthetic construct
  source 1..129: mol_type = other RNA
gagtccgagcagaagaagaagttttagagctagaaatagcaagttaaaataaggctagtccgttatcaacttgaaaaagtggcaccgagtcggtgcgagcccttcgcattcttctgctccaagtaaaga

SEQ ID NO: 5509 - RNA, 127 nt, synthetic construct
  source 1..127: mol_type = other RNA
gagtccgagcagaagaagaagttttagagctagaaatagcaagttaaaataaggctagtccgttatcaacttgaaaaagtggcaccgagtcggtgcgagcccttcgcattcttctgctccatggaag

SEQ ID NO: 5510 - RNA, 127 nt, synthetic construct
  source 1..127: mol_type = other RNA
gagtccgagcagaagaagaagttttagagctagaaatagcaagttaaaataaggctagtccgttatcaacttgaaaaagtggcaccgagtcggtgcgagcccttcgcattcttctgctccttggaag

SEQ ID NO: 5511 - RNA, 124 nt, synthetic construct
  source 1..124: mol_type = other RNA
gagtccgagcagaagaagaagttttagagctagaaatagcaagttaaaataaggctagtccgttatcaacttgaaaaagtggcaccgagtcggtgcgagcccttcgcattcttctgctccagaa

SEQ ID NO: 5512 - RNA, 128 nt, synthetic construct
  source 1..128: mol_type = other RNA
gagtccgagcagaagaagaagttttagagctagaaatagcaagttaaaataaggctagtccgttatcaacttgaaaaagtggcaccgagtcggtgcgagcccttcgcattcttctgctccctccagaa

SEQ ID NO: 5513 - RNA, 129 nt, synthetic construct
  source 1..129: mol_type = other RNA
gagtccgagcagaagaagaagttttagagctagaaatagcaagttaaaataaggctagtccgttatcaacttgaaaaagtggcaccgagtcggtgcgagcccttcgcattcttctgctccctggacaga

SEQ ID NO: 5514 - RNA, 129 nt, synthetic construct
  source 1..129: mol_type = other RNA
gagtccgagcagaagaagaagttttagagctagaaatagcaagttaaaataaggctagtccgttatcaacttgaaaaagtggcaccgagtcggtgcgagcccttcgcattcttctgctctatggacaga

SEQ ID NO: 5515 - RNA, 126 nt, synthetic construct
  source 1..126: mol_type = other RNA
gagtccgagcagaagaagaagttttagagctagaaatagcaagttaaaataaggctagtccgttatcaacttgaaaaagtggcaccgagtcggtgcgagcccttcgcattcttctgctcatagcag

SEQ ID NO: 5516 - RNA, 126 nt, synthetic construct
  source 1..126: mol_type = other RNA
gagtccgagcagaagaagaagttttagagctagaaatagcaagttaaaataaggctagtccgttatcaacttgaaaaagtggcaccgagtcggtgcgagcccttcgcattcttctgctcccagcag

SEQ ID NO: 5517 - RNA, 127 nt, synthetic construct
  source 1..127: mol_type = other RNA
gagtccgagcagaagaagaagttttagagctagaaatagcaagttaaaataaggctagtccgttatcaacttgaaaaagtggcaccgagtcggtgcgagcccttcgcattcttctgctcaacgagca

SEQ ID NO: 5518 - RNA, 128 nt, synthetic construct
  source 1..128: mol_type = other RNA
gagtccgagcagaagaagaagttttagagctagaaatagcaagttaaaataaggctagtccgttatcaacttgaaaaagtggcaccgagtcggtgcgagcccttcgcattcttctgctcaacggagca

SEQ ID NO: 5519 - RNA, 128 nt, synthetic construct
  source 1..128: mol_type = other RNA
gagtccgagcagaagaagaagttttagagctagaaatagcaagttaaaataaggctagtccgttatcaacttgaaaaagtggcaccgagtcggtgcgagcccttcgcattcttctgctcatgttgagc

SEQ ID NO: 5520 - RNA, 128 nt, synthetic construct
  source 1..128: mol_type = other RNA
gagtccgagcagaagaagaagttttagagctagaaatagcaagttaaaataaggctagtccgttatcaacttgaaaaagtggcaccgagtcggtgcgagcccttcgcattcttctgctctcaaagagc

SEQ ID NO: 5521 - RNA, 131 nt, synthetic construct
  source 1..131: mol_type = other RNA
gagtccgagcagaagaagaagttttagagctagaaatagcaagttaaaataaggctagtccgttatcaacttgaaaaagtggcaccgagtcggtgcgagcccttcgcattcttctgctcataagcgggctc

SEQ ID NO: 5522 - RNA, 131 nt, synthetic construct
  source 1..131: mol_type = other RNA
gagtccgagcagaagaagaagttttagagctagaaatagcaagttaaaataaggctagtccgttatcaacttgaaaaagtggcaccgagtcggtgcgagcccttcgcattcttctgctcacaagcgggctc

SEQ ID NO: 5523 - RNA, 131 nt, synthetic construct
  source 1..131: mol_type = other RNA
gagtccgagcagaagaagaagttttagagctagaaatagcaagttaaaataaggctagtccgttatcaacttgaaaaagtggcaccgagtcggtgcgagcccttcgcattcttctgctcaattgtagggct

SEQ ID NO: 5524 - RNA, 131 nt, synthetic construct
  source 1..131: mol_type = other RNA
gagtccgagcagaagaagaagttttagagctagaaatagcaagttaaaataaggctagtccgttatcaacttgaaaaagtggcaccgagtcggtgcgagcccttcgcattcttctgctcacttgtagggct

SEQ ID NO: 5525 - RNA, 131 nt, synthetic construct
  source 1..131: mol_type = other RNA
gagtccgagcagaagaagaagttttagagctagaaatagcaagttaaaataaggctagtccgttatcaacttgaaaaagtggcaccgagtcggtgcgagcccttcgcattcttctgctcccggacaagggc

SEQ ID NO: 5526 - RNA, 130 nt, synthetic construct
  source 1..130: mol_type = other RNA
gagtccgagcagaagaagaagttttagagctagaaatagcaagttaaaataaggctagtccgttatcaacttgaaaaagtggcaccgagtcggtgcgagcccttcgcattcttctgctctagacaagggc

SEQ ID NO: 5527 - RNA, 131 nt, synthetic construct
  source 1..131: mol_type = other RNA
gagtccgagcagaagaagaagttttagagctagaaatagcaagttaaaataaggctagtccgttatcaacttgaaaaagtggcaccgagtcggtgcgagcccttcgcattcttctgctcctgattgaaggg

SEQ ID NO: 5528 - RNA, 131 nt, synthetic construct
  source 1..131: mol_type = other RNA
gagtccgagcagaagaagaagttttagagctagaaatagcaagttaaaataaggctagtccgttatcaacttgaaaaagtggcaccgagtcggtgcgagcccttcgcattcttctgctccctgttgaaggg

SEQ ID NO: 5529 - RNA, 131 nt, synthetic construct
  source 1..131: mol_type = other RNA
gagtccgagcagaagaagaagttttagagctagaaatagcaagttaaaataaggctagtccgttatcaacttgaaaaagtggcaccgagtcggtgcgagcccttcgcattcttctgctcaactatcgaagg

SEQ ID NO: 5530 - RNA, 131 nt, synthetic construct
  source 1..131: mol_type = other RNA
gagtccgagcagaagaagaagttttagagctagaaatagcaagttaaaataaggctagtccgttatcaacttgaaaaagtggcaccgagtcggtgcgagcccttcgcattcttctgctcttctatcgaagg

SEQ ID NO: 5531 - RNA, 130 nt, synthetic construct
  source 1..130: mol_type = other RNA
gagtccgagcagaagaagaagttttagagctagaaatagcaagttaaaataaggctagtccgttatcaacttgaaaaagtggcaccgagtcggtgcgagcccttcgcattcttctgctctcaaggcgaag

SEQ ID NO: 5532 - RNA, 130 nt, synthetic construct
  source 1..130: mol_type = other RNA
gagtccgagcagaagaagaagttttagagctagaaatagcaagttaaaataaggctagtccgttatcaacttgaaaaagtggcaccgagtcggtgcgagcccttcgcattcttctgctcccaaggcgaag

SEQ ID NO: 5533 - RNA, 130 nt, synthetic construct
  source 1..130: mol_type = other RNA
gagtccgagcagaagaagaagttttagagctagaaatagcaagttaaaataaggctagtccgttatcaacttgaaaaagtggcaccgagtcggtgcgagcccttcgcattcttctgctcctcgctgcgaa

SEQ ID NO: 5534 - RNA, 130 nt, synthetic construct
  source 1..130: mol_type = other RNA
gagtccgagcagaagaagaagttttagagctagaaatagcaagttaaaataaggctagtccgttatcaacttgaaaaagtggcaccgagtcggtgcgagcccttcgcattcttctgctcaacgctgcgaa

SEQ ID NO: 5535 - RNA, 131 nt, synthetic construct
  source 1..131: mol_type = other RNA
gagtccgagcagaagaagaagttttagagctagaaatagcaagttaaaataaggctagtccgttatcaacttgaaaaagtggcaccgagtcggtgcgagcccttcgcattcttctgctccccataatgcga

SEQ ID NO: 5536 - RNA, 131 nt, synthetic construct
  source 1..131: mol_type = other RNA
gagtccgagcagaagaagaagttttagagctagaaatagcaagttaaaataaggctagtccgttatcaacttgaaaaagtggcaccgagtcggtgcgagcccttcgcattcttctgctccatataatgcga

SEQ ID NO: 5537 - RNA, 131 nt, synthetic construct
  source 1..131: mol_type = other RNA
gagtccgagcagaagaagaagttttagagctagaaatagcaagttaaaataaggctagtccgttatcaacttgaaaaagtggcaccgagtcggtgcgagcccttcgcattcttctgctcaatcgaaatgcg

SEQ ID NO: 5538 - RNA, 131 nt, synthetic construct
  source 1..131: mol_type = other RNA
gagtccgagcagaagaagaagttttagagctagaaatagcaagttaaaataaggctagtccgttatcaacttgaaaaagtggcaccgagtcggtgcgagcccttcgcattcttctgctctaccgaaatgcg

SEQ ID NO: 5539 - RNA, 131 nt, synthetic construct
  source 1..131: mol_type = other RNA
gagtccgagcagaagaagaagttttagagctagaaatagcaagttaaaataaggctagtccgttatcaacttgaaaaagtggcaccgagtcggtgcgagcccttcgcattcttctgctcttaacggaatgc

SEQ ID NO: 5540 - RNA, 131 nt, synthetic construct
  source 1..131: mol_type = other RNA
gagtccgagcagaagaagaagttttagagctagaaatagcaagttaaaataaggctagtccgttatcaacttgaaaaagtggcaccgagtcggtgcgagcccttcgcattcttctgctcatcacagaatgc

SEQ ID NO: 5541 - RNA, 131 nt, synthetic construct
  source 1..131: mol_type = other RNA
gagtccgagcagaagaagaagttttagagctagaaatagcaagttaaaataaggctagtccgttatcaacttgaaaaagtggcaccgagtcggtgcgagcccttcgcattcttctgctcttcctaagaatg

SEQ ID NO: 5542 - RNA, 131 nt, synthetic construct
  source 1..131: mol_type = other RNA
gagtccgagcagaagaagaagttttagagctagaaatagcaagttaaaataaggctagtccgttatcaacttgaaaaagtggcaccgagtcggtgcgagcccttcgcattcttctgctcttattaagaatg

SEQ ID NO: 5543 - RNA, 130 nt, synthetic construct
  source 1..130: mol_type = other RNA
gagtccgagcagaagaagaagttttagagctagaaatagcaagttaaaataaggctagtccgttatcaacttgaaaaagtggcaccgagtcggtgcgagcccttcgcattcttctgctcccacaaagaat

SEQ ID NO: 5544 - RNA, 130 nt, synthetic construct
  source 1..130: mol_type = other RNA
gagtccgagcagaagaagaagttttagagctagaaatagcaagttaaaataaggctagtccgttatcaacttgaaaaagtggcaccgagtcggtgcgagcccttcgcattcttctgctcctacaaagaat

SEQ ID NO: 5545 - RNA, 130 nt, synthetic construct
  source 1..130: mol_type = other RNA
gagtccgagcagaagaagaagttttagagctagaaatagcaagttaaaataaggctagtccgttatcaacttgaaaaagtggcaccgagtcggtgcgagcccttcgcattcttctgctccccgtgaagaa

SEQ ID NO: 5546 - RNA, 130 nt, synthetic construct
  source 1..130: mol_type = other RNA
gagtccgagcagaagaagaagttttagagctagaaatagcaagttaaaataaggctagtccgttatcaacttgaaaaagtggcaccgagtcggtgcgagcccttcgcattcttctgctccacgtgaagaa

SEQ ID NO: 5547 - RNA, 130 nt, synthetic construct
  source 1..130: mol_type = other RNA
gagtccgagcagaagaagaagttttagagctagaaatagcaagttaaaataaggctagtccgttatcaacttgaaaaagtggcaccgagtcggtgcgagcccttcgcattcttctgctctacatagaaga

SEQ ID NO: 5548 - RNA, 131 nt, synthetic construct
  source 1..131: mol_type = other RNA
gagtccgagcagaagaagaagttttagagctagaaatagcaagttaaaataaggctagtccgttatcaacttgaaaaagtggcaccgagtcggtgcgagcccttcgcattcttctgctcccacagagaaga

SEQ ID NO: 5549 - RNA, 131 nt, synthetic construct
  source 1..131: mol_type = other RNA
gagtccgagcagaagaagaagttttagagctagaaatagcaagttaaaataaggctagtccgttatcaacttgaaaaagtggcaccgagtcggtgcgagcccttcgcattcttctgctccctagacagaag

SEQ ID NO: 5550 - RNA, 131 nt, synthetic construct
  source 1..131: mol_type = other RNA
gagtccgagcagaagaagaagttttagagctagaaatagcaagttaaaataaggctagtccgttatcaacttgaaaaagtggcaccgagtcggtgcgagcccttcgcattcttctgctccttggacagaag

SEQ ID NO: 5551 - RNA, 128 nt, synthetic construct
  source 1..128: mol_type = other RNA
gagtccgagcagaagaagaagttttagagctagaaatagcaagttaaaataaggctagtccgttatcaacttgaaaaagtggcaccgagtcggtgcgagcccttcgcattcttctgctcttagcagaa

SEQ ID NO: 5552 - RNA, 128 nt, synthetic construct
  source 1..128: mol_type = other RNA
gagtccgagcagaagaagaagttttagagctagaaatagcaagttaaaataaggctagtccgttatcaacttgaaaaagtggcaccgagtcggtgcgagcccttcgcattcttctgctcccggcagaa

SEQ ID NO: 5553 - RNA, 129 nt, synthetic construct
  source 1..129: mol_type = other RNA
gagtccgagcagaagaagaagttttagagctagaaatagcaagttaaaataaggctagtccgttatcaacttgaaaaagtggcaccgagtcggtgcgagcccttcgcattcttctgctcaacgagcaga

SEQ ID NO: 5554 - RNA, 130 nt, synthetic construct
  source 1..130: mol_type = other RNA
gagtccgagcagaagaagaagttttagagctagaaatagcaagttaaaataaggctagtccgttatcaacttgaaaaagtggcaccgagtcggtgcgagcccttcgcattcttctgctcaacggagcaga

SEQ ID NO: 5555 - RNA, 130 nt, synthetic construct
  source 1..130: mol_type = other RNA
gagtccgagcagaagaagaagttttagagctagaaatagcaagttaaaataaggctagtccgttatcaacttgaaaaagtggcaccgagtcggtgcgagcccttcgcattcttctgctcaaactgagcag

SEQ ID NO: 5556 - RNA, 130 nt, synthetic construct
  source 1..130: mol_type = other RNA
gagtccgagcagaagaagaagttttagagctagaaatagcaagttaaaataaggctagtccgttatcaacttgaaaaagtggcaccgagtcggtgcgagcccttcgcattcttctgctcttagggagcag

SEQ ID NO: 5557 - RNA, 133 nt, synthetic construct
  source 1..133: mol_type = other RNA
gagtccgagcagaagaagaagttttagagctagaaatagcaagttaaaataaggctagtccgttatcaacttgaaaaagtggcaccgagtcggtgcgagcccttcgcattcttctgctcccggacaagggctc

SEQ ID NO: 5558 - RNA, 132 nt, synthetic construct
  source 1..132: mol_type = other RNA
gagtccgagcagaagaagaagttttagagctagaaatagcaagttaaaataaggctagtccgttatcaacttgaaaaagtggcaccgagtcggtgcgagcccttcgcattcttctgctctagacaagggctc

SEQ ID NO: 5559 - RNA, 133 nt, synthetic construct
  source 1..133: mol_type = other RNA
gagtccgagcagaagaagaagttttagagctagaaatagcaagttaaaataaggctagtccgttatcaacttgaaaaagtggcaccgagtcggtgcgagcccttcgcattcttctgctcctgtatgaagggct

SEQ ID NO: 5560 - RNA, 133 nt, synthetic construct
  source 1..133: mol_type = other RNA
gagtccgagcagaagaagaagttttagagctagaaatagcaagttaaaataaggctagtccgttatcaacttgaaaaagtggcaccgagtcggtgcgagcccttcgcattcttctgctcttgactgaagggct

SEQ ID NO: 5561 - RNA, 133 nt, synthetic construct
  source 1..133: mol_type = other RNA
gagtccgagcagaagaagaagttttagagctagaaatagcaagttaaaataaggctagtccgttatcaacttgaaaaagtggcaccgagtcggtgcgagcccttcgcattcttctgctcatctatcgaagggc

SEQ ID NO: 5562 - RNA, 133 nt, synthetic construct
  source 1..133: mol_type = other RNA
gagtccgagcagaagaagaagttttagagctagaaatagcaagttaaaataaggctagtccgttatcaacttgaaaaagtggcaccgagtcggtgcgagcccttcgcattcttctgctctaatatcgaagggc

SEQ ID NO: 5563 - RNA, 132 nt, synthetic construct
  source 1..132: mol_type = other RNA
gagtccgagcagaagaagaagttttagagctagaaatagcaagttaaaataaggctagtccgttatcaacttgaaaaagtggcaccgagtcggtgcgagcccttcgcattcttctgctcacaaggcgaaggg

SEQ ID NO: 5564 - RNA, 133 nt, synthetic construct
  source 1..133: mol_type = other RNA
gagtccgagcagaagaagaagttttagagctagaaatagcaagttaaaataaggctagtccgttatcaacttgaaaaagtggcaccgagtcggtgcgagcccttcgcattcttctgctcctccgggcgaaggg

SEQ ID NO: 5565 - RNA, 132 nt, synthetic construct
  source 1..132: mol_type = other RNA
gagtccgagcagaagaagaagttttagagctagaaatagcaagttaaaataaggctagtccgttatcaacttgaaaaagtggcaccgagtcggtgcgagcccttcgcattcttctgctcttcgctgcgaagg

SEQ ID NO: 5566 - RNA, 132 nt, synthetic construct
  source 1..132: mol_type = other RNA
gagtccgagcagaagaagaagttttagagctagaaatagcaagttaaaataaggctagtccgttatcaacttgaaaaagtggcaccgagtcggtgcgagcccttcgcattcttctgctcctcgctgcgaagg

SEQ ID NO: 5567 - RNA, 133 nt, synthetic construct
  source 1..133: mol_type = other RNA
gagtccgagcagaagaagaagttttagagctagaaatagcaagttaaaataaggctagtccgttatcaacttgaaaaagtggcaccgagtcggtgcgagcccttcgcattcttctgctcttcttaatgcgaag

SEQ ID NO: 5568 - RNA, 133 nt, synthetic construct
  source 1..133: mol_type = other RNA
gagtccgagcagaagaagaagttttagagctagaaatagcaagttaaaataaggctagtccgttatcaacttgaaaaagtggcaccgagtcggtgcgagcccttcgcattcttctgctcttactaatgcgaag

SEQ ID NO: 5569 - RNA, 133 nt, synthetic construct
  source 1..133: mol_type = other RNA
gagtccgagcagaagaagaagttttagagctagaaatagcaagttaaaataaggctagtccgttatcaacttgaaaaagtggcaccgagtcggtgcgagcccttcgcattcttctgctctaacgaaatgcgaa

SEQ ID NO: 5570 - RNA, 133 nt, synthetic construct
  source 1..133: mol_type = other RNA
gagtccgagcagaagaagaagttttagagctagaaatagcaagttaaaataaggctagtccgttatcaacttgaaaaagtggcaccgagtcggtgcgagcccttcgcattcttctgctccaccgaaatgcgaa

SEQ ID NO: 5571 - RNA, 131 nt, synthetic construct
  source 1..131: mol_type = other RNA
gagtccgagcagaagaagaagttttagagctagaaatagcaagttaaaataaggctagtccgttatcaacttgaaaaagtggcaccgagtcggtgcgagcccttcgcattcttctgctctagcgaatgcga

SEQ ID NO: 5572 - RNA, 133 nt, synthetic construct
  source 1..133: mol_type = other RNA
gagtccgagcagaagaagaagttttagagctagaaatagcaagttaaaataaggctagtccgttatcaacttgaaaaagtggcaccgagtcggtgcgagcccttcgcattcttctgctctatacagaatgcga

SEQ ID NO: 5573 - RNA, 133 nt, synthetic construct
  source 1..133: mol_type = other RNA
gagtccgagcagaagaagaagttttagagctagaaatagcaagttaaaataaggctagtccgttatcaacttgaaaaagtggcaccgagtcggtgcgagcccttcgcattcttctgctcactctaagaatgcg

SEQ ID NO: 5574 - RNA, 133 nt, synthetic construct
  source 1..133: mol_type = other RNA
gagtccgagcagaagaagaagttttagagctagaaatagcaagttaaaataaggctagtccgttatcaacttgaaaaagtggcaccgagtcggtgcgagcccttcgcattcttctgctccctctaagaatgcg

SEQ ID NO: 5575 - RNA, 133 nt, synthetic construct
  source 1..133: mol_type = other RNA
gagtccgagcagaagaagaagttttagagctagaaatagcaagttaaaataaggctagtccgttatcaacttgaaaaagtggcaccgagtcggtgcgagcccttcgcattcttctgctctcttcaaagaatgc

SEQ ID NO: 5576 - RNA, 133 nt, synthetic construct
  source 1..133: mol_type = other RNA
gagtccgagcagaagaagaagttttagagctagaaatagcaagttaaaataaggctagtccgttatcaacttgaaaaagtggcaccgagtcggtgcgagcccttcgcattcttctgctcttatcaaagaatgc

SEQ ID NO: 5577 - RNA, 132 nt, synthetic construct
  source 1..132: mol_type = other RNA
gagtccgagcagaagaagaagttttagagctagaaatagcaagttaaaataaggctagtccgttatcaacttgaaaaagtggcaccgagtcggtgcgagcccttcgcattcttctgctccacgtgaagaatg

SEQ ID NO: 5578 - RNA, 132 nt, synthetic construct
  source 1..132: mol_type = other RNA
gagtccgagcagaagaagaagttttagagctagaaatagcaagttaaaataaggctagtccgttatcaacttgaaaaagtggcaccgagtcggtgcgagcccttcgcattcttctgctctacgtgaagaatg

SEQ ID NO: 5579 - RNA, 133 nt, synthetic construct
  source 1..133: mol_type = other RNA
gagtccgagcagaagaagaagttttagagctagaaatagcaagttaaaataaggctagtccgttatcaacttgaaaaagtggcaccgagtcggtgcgagcccttcgcattcttctgctcttacagagaagaat

SEQ ID NO: 5580 - RNA, 132 nt, synthetic construct
  source 1..132: mol_type = other RNA
gagtccgagcagaagaagaagttttagagctagaaatagcaagttaaaataaggctagtccgttatcaacttgaaaaagtggcaccgagtcggtgcgagcccttcgcattcttctgctcataatagaagaat

SEQ ID NO: 5581 - RNA, 133 nt, synthetic construct
  source 1..133: mol_type = other RNA
gagtccgagcagaagaagaagttttagagctagaaatagcaagttaaaataaggctagtccgttatcaacttgaaaaagtggcaccgagtcggtgcgagcccttcgcattcttctgctctctagacagaagaa

SEQ ID NO: 5582 - RNA, 133 nt, synthetic construct
  source 1..133: mol_type = other RNA
gagtccgagcagaagaagaagttttagagctagaaatagcaagttaaaataaggctagtccgttatcaacttgaaaaagtggcaccgagtcggtgcgagcccttcgcattcttctgctctatagacagaagaa

SEQ ID NO: 5583 - RNA, 130 nt, synthetic construct
  source 1..130: mol_type = other RNA
gagtccgagcagaagaagaagttttagagctagaaatagcaagttaaaataaggctagtccgttatcaacttgaaaaagtggcaccgagtcggtgcgagcccttcgcattcttctgctctaggcagaaga

SEQ ID NO: 5584 - RNA, 130 nt, synthetic construct
  source 1..130: mol_type = other RNA
gagtccgagcagaagaagaagttttagagctagaaatagcaagttaaaataaggctagtccgttatcaacttgaaaaagtggcaccgagtcggtgcgagcccttcgcattcttctgctcttggcagaaga

SEQ ID NO: 5585 - RNA, 131 nt, synthetic construct
  source 1..131: mol_type = other RNA
gagtccgagcagaagaagaagttttagagctagaaatagcaagttaaaataaggctagtccgttatcaacttgaaaaagtggcaccgagtcggtgcgagcccttcgcattcttctgctcaacgagcagaag

SEQ ID NO: 5586 - RNA, 132 nt, synthetic construct
  source 1..132: mol_type = other RNA
gagtccgagcagaagaagaagttttagagctagaaatagcaagttaaaataaggctagtccgttatcaacttgaaaaagtggcaccgagtcggtgcgagcccttcgcattcttctgctcaacggagcagaag

SEQ ID NO: 5587 - RNA, 132 nt, synthetic construct
  source 1..132: mol_type = other RNA
gagtccgagcagaagaagaagttttagagctagaaatagcaagttaaaataaggctagtccgttatcaacttgaaaaagtggcaccgagtcggtgcgagcccttcgcattcttctgctcactgtgagcagaa

SEQ ID NO: 5588 - RNA, 132 nt, synthetic construct
  source 1..132: mol_type = other RNA
gagtccgagcagaagaagaagttttagagctagaaatagcaagttaaaataaggctagtccgttatcaacttgaaaaagtggcaccgagtcggtgcgagcccttcgcattcttctgctcacattgagcagaa

SEQ ID NO: 5589 - RNA, 117 nt, synthetic construct
  source 1..117: mol_type = other RNA
ggaatcccttctgcagcaccgttttagagctagaaatagcaagttaaaataaggctagtccgttatcaacttgaaaaagtggcaccgagtcggtgcaagcgatccagctgcagaagg

SEQ ID NO: 5590 - RNA, 122 nt, synthetic construct
  source 1..122: mol_type = other RNA
ggaatcccttctgcagcaccgttttagagctagaaatagcaagttaaaataaggctagtccgttatcaacttgaaaaagtggcaccgagtcggtgcaagcgatccagctgcagaaggcgctt

SEQ ID NO: 5591 - RNA, 126 nt, synthetic construct
  source 1..126: mol_type = other RNA
ggaatcccttctgcagcaccgttttagagctagaaatagcaagttaaaataaggctagtccgttatcaacttgaaaaagtggcaccgagtcggtgcaagcgatccagctgcagaaggacgatgctt

SEQ ID NO: 5592 - RNA, 127 nt, synthetic construct
  source 1..127: mol_type = other RNA
ggaatcccttctgcagcaccgttttagagctagaaatagcaagttaaaataaggctagtccgttatcaacttgaaaaagtggcaccgagtcggtgcaagcgatccagctgcagaaggactagccgct

SEQ ID NO: 5593 - RNA, 127 nt, synthetic construct
  source 1..127: mol_type = other RNA
ggaatcccttctgcagcaccgttttagagctagaaatagcaagttaaaataaggctagtccgttatcaacttgaaaaagtggcaccgagtcggtgcaagcgatccagctgcagaaggacaagccgct

SEQ ID NO: 5594 - RNA, 127 nt, synthetic construct
  source 1..127: mol_type = other RNA
ggaatcccttctgcagcaccgttttagagctagaaatagcaagttaaaataaggctagtccgttatcaacttgaaaaagtggcaccgagtcggtgcaagcgatccagctgcagaaggatcccatcgc

SEQ ID NO: 5595 - RNA, 127 nt, synthetic construct
  source 1..127: mol_type = other RNA
ggaatcccttctgcagcaccgttttagagctagaaatagcaagttaaaataaggctagtccgttatcaacttgaaaaagtggcaccgagtcggtgcaagcgatccagctgcagaaggatcacatcgc

SEQ ID NO: 5596 - RNA, 127 nt, synthetic construct
  source 1..127: mol_type = other RNA
ggaatcccttctgcagcaccgttttagagctagaaatagcaagttaaaataaggctagtccgttatcaacttgaaaaagtggcaccgagtcggtgcaagcgatccagctgcagaaggacaagtatcg

SEQ ID NO: 5597 - RNA, 127 nt, synthetic construct
  source 1..127: mol_type = other RNA
ggaatcccttctgcagcaccgttttagagctagaaatagcaagttaaaataaggctagtccgttatcaacttgaaaaagtggcaccgagtcggtgcaagcgatccagctgcagaaggacacgcatcg

SEQ ID NO: 5598 - RNA, 122 nt, synthetic construct
  source 1..122: mol_type = other RNA
ggaatcccttctgcagcaccgttttagagctagaaatagcaagttaaaataaggctagtccgttatcaacttgaaaaagtggcaccgagtcggtgcaagcgatccagctgcagaaggtgatc

SEQ ID NO: 5599 - RNA, 127 nt, synthetic construct
  source 1..127: mol_type = other RNA
ggaatcccttctgcagcaccgttttagagctagaaatagcaagttaaaataaggctagtccgttatcaacttgaaaaagtggcaccgagtcggtgcaagcgatccagctgcagaaggaccagtgatc

SEQ ID NO: 5600 - RNA, 126 nt, synthetic construct
  source 1..126: mol_type = other RNA
ggaatcccttctgcagcaccgttttagagctagaaatagcaagttaaaataaggctagtccgttatcaacttgaaaaagtggcaccgagtcggtgcaagcgatccagctgcagaaggacaacggat

SEQ ID NO: 5601 - RNA, 126 nt, synthetic construct
  source 1..126: mol_type = other RNA
ggaatcccttctgcagcaccgttttagagctagaaatagcaagttaaaataaggctagtccgttatcaacttgaaaaagtggcaccgagtcggtgcaagcgatccagctgcagaaggacatcggat

SEQ ID NO: 5602 - RNA, 127 nt, synthetic construct
  source 1..127: mol_type = other RNA
ggaatcccttctgcagcaccgttttagagctagaaatagcaagttaaaataaggctagtccgttatcaacttgaaaaagtggcaccgagtcggtgcaagcgatccagctgcagaaggatatattgga

SEQ ID NO: 5603 - RNA, 127 nt, synthetic construct
  source 1..127: mol_type = other RNA
ggaatcccttctgcagcaccgttttagagctagaaatagcaagttaaaataaggctagtccgttatcaacttgaaaaagtggcaccgagtcggtgcaagcgatccagctgcagaaggactaattgga

SEQ ID NO: 5604 - RNA, 127 nt, synthetic construct
  source 1..127: mol_type = other RNA
ggaatcccttctgcagcaccgttttagagctagaaatagcaagttaaaataaggctagtccgttatcaacttgaaaaagtggcaccgagtcggtgcaagcgatccagctgcagaaggtctaaactgg

SEQ ID NO: 5605 - RNA, 126 nt, synthetic construct
  source 1..126: mol_type = other RNA
ggaatcccttctgcagcaccgttttagagctagaaatagcaagttaaaataaggctagtccgttatcaacttgaaaaagtggcaccgagtcggtgcaagcgatccagctgcagaaggtcttactgg

SEQ ID NO: 5606 - RNA, 127 nt, synthetic construct
  source 1..127: mol_type = other RNA
ggaatcccttctgcagcaccgttttagagctagaaatagcaagttaaaataaggctagtccgttatcaacttgaaaaagtggcaccgagtcggtgcaagcgatccagctgcagaaggactagtgctg

SEQ ID NO: 5607 - RNA, 126 nt, synthetic construct
  source 1..126: mol_type = other RNA
ggaatcccttctgcagcaccgttttagagctagaaatagcaagttaaaataaggctagtccgttatcaacttgaaaaagtggcaccgagtcggtgcaagcgatccagctgcagaaggtccgtgctg

SEQ ID NO: 5608 - RNA, 127 nt, synthetic construct
  source 1..127: mol_type = other RNA
ggaatcccttctgcagcaccgttttagagctagaaatagcaagttaaaataaggctagtccgttatcaacttgaaaaagtggcaccgagtcggtgcaagcgatccagctgcagaaggacagtcagct

SEQ ID NO: 5609 - RNA, 127 nt, synthetic construct
  source 1..127: mol_type = other RNA
ggaatcccttctgcagcaccgttttagagctagaaatagcaagttaaaataaggctagtccgttatcaacttgaaaaagtggcaccgagtcggtgcaagcgatccagctgcagaaggatagacagct

SEQ ID NO: 5610 - RNA, 127 nt, synthetic construct
  source 1..127: mol_type = other RNA
ggaatcccttctgcagcaccgttttagagctagaaatagcaagttaaaataaggctagtccgttatcaacttgaaaaagtggcaccgagtcggtgcaagcgatccagctgcagaaggataacccagc

SEQ ID NO: 5611 - RNA, 127 nt, synthetic construct
  source 1..127: mol_type = other RNA
ggaatcccttctgcagcaccgttttagagctagaaatagcaagttaaaataaggctagtccgttatcaacttgaaaaagtggcaccgagtcggtgcaagcgatccagctgcagaaggatgacccagc

SEQ ID NO: 5612 - RNA, 127 nt, synthetic construct
  source 1..127: mol_type = other RNA
ggaatcccttctgcagcaccgttttagagctagaaatagcaagttaaaataaggctagtccgttatcaacttgaaaaagtggcaccgagtcggtgcaagcgatccagctgcagaaggacgaccgcag

SEQ ID NO: 5613 - RNA, 127 nt, synthetic construct
  source 1..127: mol_type = other RNA
ggaatcccttctgcagcaccgttttagagctagaaatagcaagttaaaataaggctagtccgttatcaacttgaaaaagtggcaccgagtcggtgcaagcgatccagctgcagaaggattaccgcag

SEQ ID NO: 5614 - RNA, 127 nt, synthetic construct
  source 1..127: mol_type = other RNA
ggaatcccttctgcagcaccgttttagagctagaaatagcaagttaaaataaggctagtccgttatcaacttgaaaaagtggcaccgagtcggtgcaagcgatccagctgcagaaggactgtactgc

SEQ ID NO: 5615 - RNA, 127 nt, synthetic construct
  source 1..127: mol_type = other RNA
ggaatcccttctgcagcaccgttttagagctagaaatagcaagttaaaataaggctagtccgttatcaacttgaaaaagtggcaccgagtcggtgcaagcgatccagctgcagaaggcctgtactgc

SEQ ID NO: 5616 - RNA, 127 nt, synthetic construct
  source 1..127: mol_type = other RNA
ggaatcccttctgcagcaccgttttagagctagaaatagcaagttaaaataaggctagtccgttatcaacttgaaaaagtggcaccgagtcggtgcaagcgatccagctgcagaaggagaatctctg

SEQ ID NO: 5617 - RNA, 127 nt, synthetic construct
  source 1..127: mol_type = other RNA
ggaatcccttctgcagcaccgttttagagctagaaatagcaagttaaaataaggctagtccgttatcaacttgaaaaagtggcaccgagtcggtgcaagcgatccagctgcagaaggccattctctg

SEQ ID NO: 5618 - RNA, 124 nt, synthetic construct
  source 1..124: mol_type = other RNA
ggaatcccttctgcagcaccgttttagagctagaaatagcaagttaaaataaggctagtccgttatcaacttgaaaaagtggcaccgagtcggtgcaagcgatccagctgcagaaggttcttct

SEQ ID NO: 5619 - RNA, 124 nt, synthetic construct
  source 1..124: mol_type = other RNA
ggaatcccttctgcagcaccgttttagagctagaaatagcaagttaaaataaggctagtccgttatcaacttgaaaaagtggcaccgagtcggtgcaagcgatccagctgcagaaggctcttct

SEQ ID NO: 5620 - RNA, 127 nt, synthetic construct
  source 1..127: mol_type = other RNA
ggaatcccttctgcagcaccgttttagagctagaaatagcaagttaaaataaggctagtccgttatcaacttgaaaaagtggcaccgagtcggtgcaagcgatccagctgcagaaggactgatcttc

SEQ ID NO: 5621 - RNA, 127 nt, synthetic construct
  source 1..127: mol_type = other RNA
ggaatcccttctgcagcaccgttttagagctagaaatagcaagttaaaataaggctagtccgttatcaacttgaaaaagtggcaccgagtcggtgcaagcgatccagctgcagaaggacttatcttc

SEQ ID NO: 5622 - RNA, 126 nt, synthetic construct
  source 1..126: mol_type = other RNA
ggaatcccttctgcagcaccgttttagagctagaaatagcaagttaaaataaggctagtccgttatcaacttgaaaaagtggcaccgagtcggtgcaagcgatccagctgcagaaggtccgacctt

SEQ ID NO: 5623 - RNA, 126 nt, synthetic construct
  source 1..126: mol_type = other RNA
ggaatcccttctgcagcaccgttttagagctagaaatagcaagttaaaataaggctagtccgttatcaacttgaaaaagtggcaccgagtcggtgcaagcgatccagctgcagaaggttgtacctt

SEQ ID NO: 5624 - RNA, 129 nt, synthetic construct
  source 1..129: mol_type = other RNA
ggaatcccttctgcagcaccgttttagagctagaaatagcaagttaaaataaggctagtccgttatcaacttgaaaaagtggcaccgagtcggtgcaagcgatccagctgcagaaggattatatcgctt

SEQ ID NO: 5625 - RNA, 129 nt, synthetic construct
  source 1..129: mol_type = other RNA
ggaatcccttctgcagcaccgttttagagctagaaatagcaagttaaaataaggctagtccgttatcaacttgaaaaagtggcaccgagtcggtgcaagcgatccagctgcagaaggatcctatcgctt

SEQ ID NO: 5626 - RNA, 129 nt, synthetic construct
  source 1..129: mol_type = other RNA
ggaatcccttctgcagcaccgttttagagctagaaatagcaagttaaaataaggctagtccgttatcaacttgaaaaagtggcaccgagtcggtgcaagcgatccagctgcagaaggaccgttatcgct

SEQ ID NO: 5627 - RNA, 129 nt, synthetic construct
  source 1..129: mol_type = other RNA
ggaatcccttctgcagcaccgttttagagctagaaatagcaagttaaaataaggctagtccgttatcaacttgaaaaagtggcaccgagtcggtgcaagcgatccagctgcagaaggacaactatcgct

SEQ ID NO: 5628 - RNA, 129 nt, synthetic construct
  source 1..129: mol_type = other RNA
ggaatcccttctgcagcaccgttttagagctagaaatagcaagttaaaataaggctagtccgttatcaacttgaaaaagtggcaccgagtcggtgcaagcgatccagctgcagaaggacaaatgatcgc

SEQ ID NO: 5629 - RNA, 129 nt, synthetic construct
  source 1..129: mol_type = other RNA
ggaatcccttctgcagcaccgttttagagctagaaatagcaagttaaaataaggctagtccgttatcaacttgaaaaagtggcaccgagtcggtgcaagcgatccagctgcagaaggacaattgatcgc

SEQ ID NO: 5630 - RNA, 129 nt, synthetic construct
  source 1..129: mol_type = other RNA
ggaatcccttctgcagcaccgttttagagctagaaatagcaagttaaaataaggctagtccgttatcaacttgaaaaagtggcaccgagtcggtgcaagcgatccagctgcagaaggacccggggatcg

SEQ ID NO: 5631 - RNA, 128 nt, synthetic construct
  source 1..128: mol_type = other RNA
ggaatcccttctgcagcaccgttttagagctagaaatagcaagttaaaataaggctagtccgttatcaacttgaaaaagtggcaccgagtcggtgcaagcgatccagctgcagaaggacatcggatcg

SEQ ID NO: 5632 - RNA, 129 nt, synthetic construct
  source 1..129: mol_type = other RNA
ggaatcccttctgcagcaccgttttagagctagaaatagcaagttaaaataaggctagtccgttatcaacttgaaaaagtggcaccgagtcggtgcaagcgatccagctgcagaaggactaattggatc

SEQ ID NO: 5633 - RNA, 129 nt, synthetic construct
  source 1..129: mol_type = other RNA
ggaatcccttctgcagcaccgttttagagctagaaatagcaagttaaaataaggctagtccgttatcaacttgaaaaagtggcaccgagtcggtgcaagcgatccagctgcagaaggatatattggatc

SEQ ID NO: 5634 - RNA, 129 nt, synthetic construct
  source 1..129: mol_type = other RNA
ggaatcccttctgcagcaccgttttagagctagaaatagcaagttaaaataaggctagtccgttatcaacttgaaaaagtggcaccgagtcggtgcaagcgatccagctgcagaaggataactctggat

SEQ ID NO: 5635 - RNA, 129 nt, synthetic construct
  source 1..129: mol_type = other RNA
ggaatcccttctgcagcaccgttttagagctagaaatagcaagttaaaataaggctagtccgttatcaacttgaaaaagtggcaccgagtcggtgcaagcgatccagctgcagaaggaccactctggat

SEQ ID NO: 5636 - RNA, 129 nt, synthetic construct
  source 1..129: mol_type = other RNA
ggaatcccttctgcagcaccgttttagagctagaaatagcaagttaaaataaggctagtccgttatcaacttgaaaaagtggcaccgagtcggtgcaagcgatccagctgcagaaggacccccgctgga

SEQ ID NO: 5637 - RNA, 129 nt, synthetic construct
  source 1..129: mol_type = other RNA
ggaatcccttctgcagcaccgttttagagctagaaatagcaagttaaaataaggctagtccgttatcaacttgaaaaagtggcaccgagtcggtgcaagcgatccagctgcagaaggacatccgctgga

SEQ ID NO: 5638 - RNA, 129 nt, synthetic construct
  source 1..129: mol_type = other RNA
ggaatcccttctgcagcaccgttttagagctagaaatagcaagttaaaataaggctagtccgttatcaacttgaaaaagtggcaccgagtcggtgcaagcgatccagctgcagaaggagacatagctgg

SEQ ID NO: 5639 - RNA, 129 nt, synthetic construct
  source 1..129: mol_type = other RNA
ggaatcccttctgcagcaccgttttagagctagaaatagcaagttaaaataaggctagtccgttatcaacttgaaaaagtggcaccgagtcggtgcaagcgatccagctgcagaaggacacatagctgg

SEQ ID NO: 5640 - RNA, 129 nt, synthetic construct
  source 1..129: mol_type = other RNA
ggaatcccttctgcagcaccgttttagagctagaaatagcaagttaaaataaggctagtccgttatcaacttgaaaaagtggcaccgagtcggtgcaagcgatccagctgcagaaggagagttcagctg

SEQ ID NO: 5641 - RNA, 129 nt, synthetic construct
  source 1..129: mol_type = other RNA
ggaatcccttctgcagcaccgttttagagctagaaatagcaagttaaaataaggctagtccgttatcaacttgaaaaagtggcaccgagtcggtgcaagcgatccagctgcagaaggccagttcagctg

SEQ ID NO: 5642 - RNA, 129 nt, synthetic construct
  source 1..129: mol_type = other RNA
ggaatcccttctgcagcaccgttttagagctagaaatagcaagttaaaataaggctagtccgttatcaacttgaaaaagtggcaccgagtcggtgcaagcgatccagctgcagaaggccgaccgcagct

SEQ ID NO: 5643 - RNA, 129 nt, synthetic construct
  source 1..129: mol_type = other RNA
ggaatcccttctgcagcaccgttttagagctagaaatagcaagttaaaataaggctagtccgttatcaacttgaaaaagtggcaccgagtcggtgcaagcgatccagctgcagaaggacgaccgcagct

SEQ ID NO: 5644 - RNA, 129 nt, synthetic construct
  source 1..129: mol_type = other RNA
ggaatcccttctgcagcaccgttttagagctagaaatagcaagttaaaataaggctagtccgttatcaacttgaaaaagtggcaccgagtcggtgcaagcgatccagctgcagaaggaggaattgcagc

SEQ ID NO: 5645 - RNA, 129 nt, synthetic construct
  source 1..129: mol_type = other RNA
ggaatcccttctgcagcaccgttttagagctagaaatagcaagttaaaataaggctagtccgttatcaacttgaaaaagtggcaccgagtcggtgcaagcgatccagctgcagaaggtctgattgcagc

SEQ ID NO: 5646 - RNA, 129 nt, synthetic construct
  source 1..129: mol_type = other RNA
ggaatcccttctgcagcaccgttttagagctagaaatagcaagttaaaataaggctagtccgttatcaacttgaaaaagtggcaccgagtcggtgcaagcgatccagctgcagaaggccttccctgcag

SEQ ID NO: 5647 - RNA, 129 nt, synthetic construct
  source 1..129: mol_type = other RNA
ggaatcccttctgcagcaccgttttagagctagaaatagcaagttaaaataaggctagtccgttatcaacttgaaaaagtggcaccgagtcggtgcaagcgatccagctgcagaaggcggtccctgcag

SEQ ID NO: 5648 - RNA, 126 nt, synthetic construct
  source 1..126: mol_type = other RNA
ggaatcccttctgcagcaccgttttagagctagaaatagcaagttaaaataaggctagtccgttatcaacttgaaaaagtggcaccgagtcggtgcaagcgatccagctgcagaaggcccttctgc

SEQ ID NO: 5649 - RNA, 126 nt, synthetic construct
  source 1..126: mol_type = other RNA
ggaatcccttctgcagcaccgttttagagctagaaatagcaagttaaaataaggctagtccgttatcaacttgaaaaagtggcaccgagtcggtgcaagcgatccagctgcagaaggctcttctgc

SEQ ID NO: 5650 - RNA, 129 nt, synthetic construct
  source 1..129: mol_type = other RNA
ggaatcccttctgcagcaccgttttagagctagaaatagcaagttaaaataaggctagtccgttatcaacttgaaaaagtggcaccgagtcggtgcaagcgatccagctgcagaaggaggaatcttctg

SEQ ID NO: 5651 - RNA, 129 nt, synthetic construct
  source 1..129: mol_type = other RNA
ggaatcccttctgcagcaccgttttagagctagaaatagcaagttaaaataaggctagtccgttatcaacttgaaaaagtggcaccgagtcggtgcaagcgatccagctgcagaaggagttatcttctg

SEQ ID NO: 5652 - RNA, 128 nt, synthetic construct
  source 1..128: mol_type = other RNA
ggaatcccttctgcagcaccgttttagagctagaaatagcaagttaaaataaggctagtccgttatcaacttgaaaaagtggcaccgagtcggtgcaagcgatccagctgcagaaggtcgaaccttct

SEQ ID NO: 5653 - RNA, 128 nt, synthetic construct
  source 1..128: mol_type = other RNA
ggaatcccttctgcagcaccgttttagagctagaaatagcaagttaaaataaggctagtccgttatcaacttgaaaaagtggcaccgagtcggtgcaagcgatccagctgcagaaggtcctaccttct

SEQ ID NO: 5654 - RNA, 131 nt, synthetic construct
  source 1..131: mol_type = other RNA
ggaatcccttctgcagcaccgttttagagctagaaatagcaagttaaaataaggctagtccgttatcaacttgaaaaagtggcaccgagtcggtgcaagcgatccagctgcagaaggacaaatgatcgctt

SEQ ID NO: 5655 - RNA, 131 nt, synthetic construct
  source 1..131: mol_type = other RNA
ggaatcccttctgcagcaccgttttagagctagaaatagcaagttaaaataaggctagtccgttatcaacttgaaaaagtggcaccgagtcggtgcaagcgatccagctgcagaaggattactgatcgctt

SEQ ID NO: 5656 - RNA, 131 nt, synthetic construct
  source 1..131: mol_type = other RNA
ggaatcccttctgcagcaccgttttagagctagaaatagcaagttaaaataaggctagtccgttatcaacttgaaaaagtggcaccgagtcggtgcaagcgatccagctgcagaaggacccggggatcgct

SEQ ID NO: 5657 - RNA, 130 nt, synthetic construct
  source 1..130: mol_type = other RNA
ggaatcccttctgcagcaccgttttagagctagaaatagcaagttaaaataaggctagtccgttatcaacttgaaaaagtggcaccgagtcggtgcaagcgatccagctgcagaaggacatcggatcgct

SEQ ID NO: 5658 - RNA, 131 nt, synthetic construct
  source 1..131: mol_type = other RNA
ggaatcccttctgcagcaccgttttagagctagaaatagcaagttaaaataaggctagtccgttatcaacttgaaaaagtggcaccgagtcggtgcaagcgatccagctgcagaaggacctattggatcgc

SEQ ID NO: 5659 - RNA, 131 nt, synthetic construct
  source 1..131: mol_type = other RNA
ggaatcccttctgcagcaccgttttagagctagaaatagcaagttaaaataaggctagtccgttatcaacttgaaaaagtggcaccgagtcggtgcaagcgatccagctgcagaaggattaattggatcgc

SEQ ID NO: 5660 - RNA, 131 nt, synthetic construct
  source 1..131: mol_type = other RNA
ggaatcccttctgcagcaccgttttagagctagaaatagcaagttaaaataaggctagtccgttatcaacttgaaaaagtggcaccgagtcggtgcaagcgatccagctgcagaaggatcactctggatcg

SEQ ID NO: 5661 - RNA, 131 nt, synthetic construct
  source 1..131: mol_type = other RNA
ggaatcccttctgcagcaccgttttagagctagaaatagcaagttaaaataaggctagtccgttatcaacttgaaaaagtggcaccgagtcggtgcaagcgatccagctgcagaaggataactctggatcg

SEQ ID NO: 5662 - RNA, 131 nt, synthetic construct
  source 1..131: mol_type = other RNA
ggaatcccttctgcagcaccgttttagagctagaaatagcaagttaaaataaggctagtccgttatcaacttgaaaaagtggcaccgagtcggtgcaagcgatccagctgcagaaggatatccgctggatc

SEQ ID NO: 5663 - RNA, 131 nt, synthetic construct
  source 1..131: mol_type = other RNA
ggaatcccttctgcagcaccgttttagagctagaaatagcaagttaaaataaggctagtccgttatcaacttgaaaaagtggcaccgagtcggtgcaagcgatccagctgcagaaggagatccgctggatc

SEQ ID NO: 5664 - RNA, 131 nt, synthetic construct
  source 1..131: mol_type = other RNA
ggaatcccttctgcagcaccgttttagagctagaaatagcaagttaaaataaggctagtccgttatcaacttgaaaaagtggcaccgagtcggtgcaagcgatccagctgcagaaggacaaatagctggat

SEQ ID NO: 5665 - RNA, 131 nt, synthetic construct
  source 1..131: mol_type = other RNA
ggaatcccttctgcagcaccgttttagagctagaaatagcaagttaaaataaggctagtccgttatcaacttgaaaaagtggcaccgagtcggtgcaagcgatccagctgcagaaggataaatagctggat

SEQ ID NO: 5666 - RNA, 131 nt, synthetic construct
  source 1..131: mol_type = other RNA
ggaatcccttctgcagcaccgttttagagctagaaatagcaagttaaaataaggctagtccgttatcaacttgaaaaagtggcaccgagtcggtgcaagcgatccagctgcagaaggttagttcagctgga

SEQ ID NO: 5667 - RNA, 131 nt, synthetic construct
  source 1..131: mol_type = other RNA
ggaatcccttctgcagcaccgttttagagctagaaatagcaagttaaaataaggctagtccgttatcaacttgaaaaagtggcaccgagtcggtgcaagcgatccagctgcagaaggcgggttcagctgga

SEQ ID NO: 5668 - RNA, 131 nt, synthetic construct
  source 1..131: mol_type = other RNA
ggaatcccttctgcagcaccgttttagagctagaaatagcaagttaaaataaggctagtccgttatcaacttgaaaaagtggcaccgagtcggtgcaagcgatccagctgcagaaggcccaccgcagctgg

SEQ ID NO: 5669 - RNA, 131 nt, synthetic construct
  source 1..131: mol_type = other RNA
ggaatcccttctgcagcaccgttttagagctagaaatagcaagttaaaataaggctagtccgttatcaacttgaaaaagtggcaccgagtcggtgcaagcgatccagctgcagaaggccgaccgcagctgg

SEQ ID NO: 5670 - RNA, 131 nt, synthetic construct
  source 1..131: mol_type = other RNA
ggaatcccttctgcagcaccgttttagagctagaaatagcaagttaaaataaggctagtccgttatcaacttgaaaaagtggcaccgagtcggtgcaagcgatccagctgcagaaggacaaattgcagctg

SEQ ID NO: 5671 - RNA, 131 nt, synthetic construct
  source 1..131: mol_type = other RNA
ggaatcccttctgcagcaccgttttagagctagaaatagcaagttaaaataaggctagtccgttatcaacttgaaaaagtggcaccgagtcggtgcaagcgatccagctgcagaaggatagattgcagctg

SEQ ID NO: 5672 - RNA, 131 nt, synthetic construct
  source 1..131: mol_type = other RNA
ggaatcccttctgcagcaccgttttagagctagaaatagcaagttaaaataaggctagtccgttatcaacttgaaaaagtggcaccgagtcggtgcaagcgatccagctgcagaaggccgtccctgcagct

SEQ ID NO: 5673 - RNA, 131 nt, synthetic construct
  source 1..131: mol_type = other RNA
ggaatcccttctgcagcaccgttttagagctagaaatagcaagttaaaataaggctagtccgttatcaacttgaaaaagtggcaccgagtcggtgcaagcgatccagctgcagaaggccttccctgcagct

SEQ ID NO: 5674 - RNA, 131 nt, synthetic construct
  source 1..131: mol_type = other RNA
ggaatcccttctgcagcaccgttttagagctagaaatagcaagttaaaataaggctagtccgttatcaacttgaaaaagtggcaccgagtcggtgcaagcgatccagctgcagaaggtcaatctctgcagc

SEQ ID NO: 5675 - RNA, 131 nt, synthetic construct
  source 1..131: mol_type = other RNA
ggaatcccttctgcagcaccgttttagagctagaaatagcaagttaaaataaggctagtccgttatcaacttgaaaaagtggcaccgagtcggtgcaagcgatccagctgcagaaggagtatctctgcagc

SEQ ID NO: 5676 - RNA, 128 nt, synthetic construct
  source 1..128: mol_type = other RNA
ggaatcccttctgcagcaccgttttagagctagaaatagcaagttaaaataaggctagtccgttatcaacttgaaaaagtggcaccgagtcggtgcaagcgatccagctgcagaaggcccttctgcag

SEQ ID NO: 5677 - RNA, 128 nt, synthetic construct
  source 1..128: mol_type = other RNA
ggaatcccttctgcagcaccgttttagagctagaaatagcaagttaaaataaggctagtccgttatcaacttgaaaaagtggcaccgagtcggtgcaagcgatccagctgcagaaggaccttctgcag

SEQ ID NO: 5678 - RNA, 130 nt, synthetic construct
  source 1..130: mol_type = other RNA
ggaatcccttctgcagcaccgttttagagctagaaatagcaagttaaaataaggctagtccgttatcaacttgaaaaagtggcaccgagtcggtgcaagcgatccagctgcagaaggtgagaccttctgc

SEQ ID NO: 5679 - RNA, 130 nt, synthetic construct
  source 1..130: mol_type = other RNA
ggaatcccttctgcagcaccgttttagagctagaaatagcaagttaaaataaggctagtccgttatcaacttgaaaaagtggcaccgagtcggtgcaagcgatccagctgcagaaggtccgaccttctgc

SEQ ID NO: 5680 - RNA, 117 nt, synthetic construct
  source 1..117: mol_type = other RNA
ggaatcccttctgcagcaccgttttagagctagaaatagcaagttaaaataaggctagtccgttatcaacttgaaaaagtggcaccgagtcggtgcaagcgatcaaggtgctgcaga

SEQ ID NO: 5681 - RNA, 127 nt, synthetic construct
  source 1..127: mol_type = other RNA
ggaatcccttctgcagcaccgttttagagctagaaatagcaagttaaaataaggctagtccgttatcaacttgaaaaagtggcaccgagtcggtgcaagcgatcaaggtgctgcagactccgagctt

SEQ ID NO: 5682 - RNA, 127 nt, synthetic construct
  source 1..127: mol_type = other RNA
ggaatcccttctgcagcaccgttttagagctagaaatagcaagttaaaataaggctagtccgttatcaacttgaaaaagtggcaccgagtcggtgcaagcgatcaaggtgctgcagatataccgctt

SEQ ID NO: 5683 - RNA, 126 nt, synthetic construct
  source 1..126: mol_type = other RNA
ggaatcccttctgcagcaccgttttagagctagaaatagcaagttaaaataaggctagtccgttatcaacttgaaaaagtggcaccgagtcggtgcaagcgatcaaggtgctgcagattatccgct

SEQ ID NO: 5684 - RNA, 127 nt, synthetic construct
  source 1..127: mol_type = other RNA
ggaatcccttctgcagcaccgttttagagctagaaatagcaagttaaaataaggctagtccgttatcaacttgaaaaagtggcaccgagtcggtgcaagcgatcaaggtgctgcagattcatccgct

SEQ ID NO: 5685 - RNA, 127 nt, synthetic construct
  source 1..127: mol_type = other RNA
ggaatcccttctgcagcaccgttttagagctagaaatagcaagttaaaataaggctagtccgttatcaacttgaaaaagtggcaccgagtcggtgcaagcgatcaaggtgctgcagattaatctcgc

SEQ ID NO: 5686 - RNA, 126 nt, synthetic construct
  source 1..126: mol_type = other RNA
ggaatcccttctgcagcaccgttttagagctagaaatagcaagttaaaataaggctagtccgttatcaacttgaaaaagtggcaccgagtcggtgcaagcgatcaaggtgctgcagataatctcgc

SEQ ID NO: 5687 - RNA, 125 nt, synthetic construct
  source 1..125: mol_type = other RNA
ggaatcccttctgcagcaccgttttagagctagaaatagcaagttaaaataaggctagtccgttatcaacttgaaaaagtggcaccgagtcggtgcaagcgatcaaggtgctgcagagaatatcg

SEQ ID NO: 5688 - RNA, 125 nt, synthetic construct
  source 1..125: mol_type = other RNA
ggaatcccttctgcagcaccgttttagagctagaaatagcaagttaaaataaggctagtccgttatcaacttgaaaaagtggcaccgagtcggtgcaagcgatcaaggtgctgcagattacatcg

SEQ ID NO: 5689 - RNA, 127 nt, synthetic construct
  source 1..127: mol_type = other RNA
ggaatcccttctgcagcaccgttttagagctagaaatagcaagttaaaataaggctagtccgttatcaacttgaaaaagtggcaccgagtcggtgcaagcgatcaaggtgctgcagacaaaacgatc

SEQ ID NO: 5690 - RNA, 127 nt, synthetic construct
  source 1..127: mol_type = other RNA
ggaatcccttctgcagcaccgttttagagctagaaatagcaagttaaaataaggctagtccgttatcaacttgaaaaagtggcaccgagtcggtgcaagcgatcaaggtgctgcagacaaatcgatc

SEQ ID NO: 5691 - RNA, 127 nt, synthetic construct
  source 1..127: mol_type = other RNA
ggaatcccttctgcagcaccgttttagagctagaaatagcaagttaaaataaggctagtccgttatcaacttgaaaaagtggcaccgagtcggtgcaagcgatcaaggtgctgcagatattattgat

SEQ ID NO: 5692 - RNA, 127 nt, synthetic construct
  source 1..127: mol_type = other RNA
ggaatcccttctgcagcaccgttttagagctagaaatagcaagttaaaataaggctagtccgttatcaacttgaaaaagtggcaccgagtcggtgcaagcgatcaaggtgctgcagattctattgat

SEQ ID NO: 5693 - RNA, 126 nt, synthetic construct
  source 1..126: mol_type = other RNA
ggaatcccttctgcagcaccgttttagagctagaaatagcaagttaaaataaggctagtccgttatcaacttgaaaaagtggcaccgagtcggtgcaagcgatcaaggtgctgcagattcgattga

SEQ ID NO: 5694 - RNA, 127 nt, synthetic construct
  source 1..127: mol_type = other RNA
ggaatcccttctgcagcaccgttttagagctagaaatagcaagttaaaataaggctagtccgttatcaacttgaaaaagtggcaccgagtcggtgcaagcgatcaaggtgctgcagatatgtgttga

SEQ ID NO: 5695 - RNA, 126 nt, synthetic construct
  source 1..126: mol_type = other RNA
ggaatcccttctgcagcaccgttttagagctagaaatagcaagttaaaataaggctagtccgttatcaacttgaaaaagtggcaccgagtcggtgcaagcgatcaaggtgctgcagagaagtcttg

SEQ ID NO: 5696 - RNA, 126 nt, synthetic construct
  source 1..126: mol_type = other RNA
ggaatcccttctgcagcaccgttttagagctagaaatagcaagttaaaataaggctagtccgttatcaacttgaaaaagtggcaccgagtcggtgcaagcgatcaaggtgctgcagataagtcttg

SEQ ID NO: 5697 - RNA, 127 nt, synthetic construct
  source 1..127: mol_type = other RNA
ggaatcccttctgcagcaccgttttagagctagaaatagcaagttaaaataaggctagtccgttatcaacttgaaaaagtggcaccgagtcggtgcaagcgatcaaggtgctgcagactcatccctt

SEQ ID NO: 5698 - RNA, 127 nt, synthetic construct
  source 1..127: mol_type = other RNA
ggaatcccttctgcagcaccgttttagagctagaaatagcaagttaaaataaggctagtccgttatcaacttgaaaaagtggcaccgagtcggtgcaagcgatcaaggtgctgcagattcatccctt

SEQ ID NO: 5699 - RNA, 127 nt, synthetic construct
  source 1..127: mol_type = other RNA
ggaatcccttctgcagcaccgttttagagctagaaatagcaagttaaaataaggctagtccgttatcaacttgaaaaagtggcaccgagtcggtgcaagcgatcaaggtgctgcagatattatacct

SEQ ID NO: 5700 - RNA, 127 nt, synthetic construct
  source 1..127: mol_type = other RNA
ggaatcccttctgcagcaccgttttagagctagaaatagcaagttaaaataaggctagtccgttatcaacttgaaaaagtggcaccgagtcggtgcaagcgatcaaggtgctgcagattatatacct

SEQ ID NO: 5701 - RNA, 127 nt, synthetic construct
  source 1..127: mol_type = other RNA
ggaatcccttctgcagcaccgttttagagctagaaatagcaagttaaaataaggctagtccgttatcaacttgaaaaagtggcaccgagtcggtgcaagcgatcaaggtgctgcagatatcctcacc

SEQ ID NO: 5702 - RNA, 127 nt, synthetic construct
  source 1..127: mol_type = other RNA
ggaatcccttctgcagcaccgttttagagctagaaatagcaagttaaaataaggctagtccgttatcaacttgaaaaagtggcaccgagtcggtgcaagcgatcaaggtgctgcagatctcctcacc

SEQ ID NO: 5703 - RNA, 127 nt, synthetic construct
  source 1..127: mol_type = other RNA
ggaatcccttctgcagcaccgttttagagctagaaatagcaagttaaaataaggctagtccgttatcaacttgaaaaagtggcaccgagtcggtgcaagcgatcaaggtgctgcagacaactcgcac

SEQ ID NO: 5704 - RNA, 127 nt, synthetic construct
  source 1..127: mol_type = other RNA
ggaatcccttctgcagcaccgttttagagctagaaatagcaagttaaaataaggctagtccgttatcaacttgaaaaagtggcaccgagtcggtgcaagcgatcaaggtgctgcagatcactcgcac

SEQ ID NO: 5705 - RNA, 127 nt, synthetic construct
  source 1..127: mol_type = other RNA
ggaatcccttctgcagcaccgttttagagctagaaatagcaagttaaaataaggctagtccgttatcaacttgaaaaagtggcaccgagtcggtgcaagcgatcaaggtgctgcagacataatagca

SEQ ID NO: 5706 - RNA, 127 nt, synthetic construct
  source 1..127: mol_type = other RNA
ggaatcccttctgcagcaccgttttagagctagaaatagcaagttaaaataaggctagtccgttatcaacttgaaaaagtggcaccgagtcggtgcaagcgatcaaggtgctgcagaccgaatagca

SEQ ID NO: 5707 - RNA, 126 nt, synthetic construct
  source 1..126: mol_type = other RNA
ggaatcccttctgcagcaccgttttagagctagaaatagcaagttaaaataaggctagtccgttatcaacttgaaaaagtggcaccgagtcggtgcaagcgatcaaggtgctgcagacaaatcagc

SEQ ID NO: 5708 - RNA, 126 nt, synthetic construct
  source 1..126: mol_type = other RNA
ggaatcccttctgcagcaccgttttagagctagaaatagcaagttaaaataaggctagtccgttatcaacttgaaaaagtggcaccgagtcggtgcaagcgatcaaggtgctgcagataaatcagc

SEQ ID NO: 5709 - RNA, 127 nt, synthetic construct
  source 1..127: mol_type = other RNA
ggaatcccttctgcagcaccgttttagagctagaaatagcaagttaaaataaggctagtccgttatcaacttgaaaaagtggcaccgagtcggtgcaagcgatcaaggtgctgcagaccgtaagcag

SEQ ID NO: 5710 - RNA, 127 nt, synthetic construct
  source 1..127: mol_type = other RNA
ggaatcccttctgcagcaccgttttagagctagaaatagcaagttaaaataaggctagtccgttatcaacttgaaaaagtggcaccgagtcggtgcaagcgatcaaggtgctgcagacagtaagcag

SEQ ID NO: 5711 - RNA, 127 nt, synthetic construct
  source 1..127: mol_type = other RNA
ggaatcccttctgcagcaccgttttagagctagaaatagcaagttaaaataaggctagtccgttatcaacttgaaaaagtggcaccgagtcggtgcaagcgatcaaggtgctgcagattgtggtgca

SEQ ID NO: 5712 - RNA, 127 nt, synthetic construct
  source 1..127: mol_type = other RNA
ggaatcccttctgcagcaccgttttagagctagaaatagcaagttaaaataaggctagtccgttatcaacttgaaaaagtggcaccgagtcggtgcaagcgatcaaggtgctgcagagtgtggtgca

SEQ ID NO: 5713 - RNA, 127 nt, synthetic construct
  source 1..127: mol_type = other RNA
ggaatcccttctgcagcaccgttttagagctagaaatagcaagttaaaataaggctagtccgttatcaacttgaaaaagtggcaccgagtcggtgcaagcgatcaaggtgctgcagacagaggctgc

SEQ ID NO: 5714 - RNA, 127 nt, synthetic construct
  source 1..127: mol_type = other RNA
ggaatcccttctgcagcaccgttttagagctagaaatagcaagttaaaataaggctagtccgttatcaacttgaaaaagtggcaccgagtcggtgcaagcgatcaaggtgctgcagacaatggctgc

SEQ ID NO: 5715 - RNA, 126 nt, synthetic construct
  source 1..126: mol_type = other RNA
ggaatcccttctgcagcaccgttttagagctagaaatagcaagttaaaataaggctagtccgttatcaacttgaaaaagtggcaccgagtcggtgcaagcgatcaaggtgctgcagataacatctg

SEQ ID NO: 5716 - RNA, 126 nt, synthetic construct
  source 1..126: mol_type = other RNA
ggaatcccttctgcagcaccgttttagagctagaaatagcaagttaaaataaggctagtccgttatcaacttgaaaaagtggcaccgagtcggtgcaagcgatcaaggtgctgcagattccatctg

SEQ ID NO: 5717 - RNA, 129 nt, synthetic construct
  source 1..129: mol_type = other RNA
ggaatcccttctgcagcaccgttttagagctagaaatagcaagttaaaataaggctagtccgttatcaacttgaaaaagtggcaccgagtcggtgcaagcgatcaaggtgctgcagattaatctcgctt

SEQ ID NO: 5718 - RNA, 128 nt, synthetic construct
  source 1..128: mol_type = other RNA
ggaatcccttctgcagcaccgttttagagctagaaatagcaagttaaaataaggctagtccgttatcaacttgaaaaagtggcaccgagtcggtgcaagcgatcaaggtgctgcagataatctcgctt

SEQ ID NO: 5719 - RNA, 129 nt, synthetic construct
  source 1..129: mol_type = other RNA
ggaatcccttctgcagcaccgttttagagctagaaatagcaagttaaaataaggctagtccgttatcaacttgaaaaagtggcaccgagtcggtgcaagcgatcaaggtgctgcagataggtcatcgct

SEQ ID NO: 5720 - RNA, 127 nt, synthetic construct
  source 1..127: mol_type = other RNA
ggaatcccttctgcagcaccgttttagagctagaaatagcaagttaaaataaggctagtccgttatcaacttgaaaaagtggcaccgagtcggtgcaagcgatcaaggtgctgcagagaatatcgct

SEQ ID NO: 5721 - RNA, 129 nt, synthetic construct
  source 1..129: mol_type = other RNA
ggaatcccttctgcagcaccgttttagagctagaaatagcaagttaaaataaggctagtccgttatcaacttgaaaaagtggcaccgagtcggtgcaagcgatcaaggtgctgcagataggtcgatcgc

SEQ ID NO: 5722 - RNA, 129 nt, synthetic construct
  source 1..129: mol_type = other RNA
ggaatcccttctgcagcaccgttttagagctagaaatagcaagttaaaataaggctagtccgttatcaacttgaaaaagtggcaccgagtcggtgcaagcgatcaaggtgctgcagatatatcgatcgc

SEQ ID NO: 5723 - RNA, 129 nt, synthetic construct
  source 1..129: mol_type = other RNA
ggaatcccttctgcagcaccgttttagagctagaaatagcaagttaaaataaggctagtccgttatcaacttgaaaaagtggcaccgagtcggtgcaagcgatcaaggtgctgcagatatgggtgatcg

SEQ ID NO: 5724 - RNA, 129 nt, synthetic construct
  source 1..129: mol_type = other RNA
ggaatcccttctgcagcaccgttttagagctagaaatagcaagttaaaataaggctagtccgttatcaacttgaaaaagtggcaccgagtcggtgcaagcgatcaaggtgctgcagatatggatgatcg

SEQ ID NO: 5725 - RNA, 129 nt, synthetic construct
  source 1..129: mol_type = other RNA
ggaatcccttctgcagcaccgttttagagctagaaatagcaagttaaaataaggctagtccgttatcaacttgaaaaagtggcaccgagtcggtgcaagcgatcaaggtgctgcagatatgtgttgatc

SEQ ID NO: 5726 - RNA, 129 nt, synthetic construct
  source 1..129: mol_type = other RNA
ggaatcccttctgcagcaccgttttagagctagaaatagcaagttaaaataaggctagtccgttatcaacttgaaaaagtggcaccgagtcggtgcaagcgatcaaggtgctgcagacatgtattgatc

SEQ ID NO: 5727 - RNA, 129 nt, synthetic construct
  source 1..129: mol_type = other RNA
ggaatcccttctgcagcaccgttttagagctagaaatagcaagttaaaataaggctagtccgttatcaacttgaaaaagtggcaccgagtcggtgcaagcgatcaaggtgctgcagattccctcttgat

SEQ ID NO: 5728 - RNA, 129 nt, synthetic construct
  source 1..129: mol_type = other RNA
ggaatcccttctgcagcaccgttttagagctagaaatagcaagttaaaataaggctagtccgttatcaacttgaaaaagtggcaccgagtcggtgcaagcgatcaaggtgctgcagatattgtcttgat

SEQ ID NO: 5729 - RNA, 128 nt, synthetic construct
  source 1..128: mol_type = other RNA
ggaatcccttctgcagcaccgttttagagctagaaatagcaagttaaaataaggctagtccgttatcaacttgaaaaagtggcaccgagtcggtgcaagcgatcaaggtgctgcagacctccccttga

SEQ ID NO: 5730 - RNA, 128 nt, synthetic construct
  source 1..128: mol_type = other RNA
ggaatcccttctgcagcaccgttttagagctagaaatagcaagttaaaataaggctagtccgttatcaacttgaaaaagtggcaccgagtcggtgcaagcgatcaaggtgctgcagacctacccttga

SEQ ID NO: 5731 - RNA, 129 nt, synthetic construct
  source 1..129: mol_type = other RNA
ggaatcccttctgcagcaccgttttagagctagaaatagcaagttaaaataaggctagtccgttatcaacttgaaaaagtggcaccgagtcggtgcaagcgatcaaggtgctgcagattatataccttg

SEQ ID NO: 5732 - RNA, 129 nt, synthetic construct
  source 1..129: mol_type = other RNA
ggaatcccttctgcagcaccgttttagagctagaaatagcaagttaaaataaggctagtccgttatcaacttgaaaaagtggcaccgagtcggtgcaagcgatcaaggtgctgcagatattataccttg

SEQ ID NO: 5733 - RNA, 129 nt, synthetic construct
  source 1..129: mol_type = other RNA
ggaatcccttctgcagcaccgttttagagctagaaatagcaagttaaaataaggctagtccgttatcaacttgaaaaagtggcaccgagtcggtgcaagcgatcaaggtgctgcagataccctcacctt

SEQ ID NO: 5734 - RNA, 129 nt, synthetic construct
  source 1..129: mol_type = other RNA
ggaatcccttctgcagcaccgttttagagctagaaatagcaagttaaaataaggctagtccgttatcaacttgaaaaagtggcaccgagtcggtgcaagcgatcaaggtgctgcagactccctcacctt

SEQ ID NO: 5735 - RNA, 129 nt, synthetic construct
  source 1..129: mol_type = other RNA
ggaatcccttctgcagcaccgttttagagctagaaatagcaagttaaaataaggctagtccgttatcaacttgaaaaagtggcaccgagtcggtgcaagcgatcaaggtgctgcagactactcgcacct

SEQ ID NO: 5736 - RNA, 129 nt, synthetic construct
  source 1..129: mol_type = other RNA
ggaatcccttctgcagcaccgttttagagctagaaatagcaagttaaaataaggctagtccgttatcaacttgaaaaagtggcaccgagtcggtgcaagcgatcaaggtgctgcagatcactcgcacct

SEQ ID NO: 5737 - RNA, 129 nt, synthetic construct
  source 1..129: mol_type = other RNA
ggaatcccttctgcagcaccgttttagagctagaaatagcaagttaaaataaggctagtccgttatcaacttgaaaaagtggcaccgagtcggtgcaagcgatcaaggtgctgcagatcgaatagcacc

SEQ ID NO: 5738 - RNA, 129 nt, synthetic construct
  source 1..129: mol_type = other RNA
ggaatcccttctgcagcaccgttttagagctagaaatagcaagttaaaataaggctagtccgttatcaacttgaaaaagtggcaccgagtcggtgcaagcgatcaaggtgctgcagatcacatagcacc

SEQ ID NO: 5739 - RNA, 128 nt, synthetic construct
  source 1..128: mol_type = other RNA
ggaatcccttctgcagcaccgttttagagctagaaatagcaagttaaaataaggctagtccgttatcaacttgaaaaagtggcaccgagtcggtgcaagcgatcaaggtgctgcagatcgatcagcac

SEQ ID NO: 5740 - RNA, 128 nt, synthetic construct
  source 1..128: mol_type = other RNA
ggaatcccttctgcagcaccgttttagagctagaaatagcaagttaaaataaggctagtccgttatcaacttgaaaaagtggcaccgagtcggtgcaagcgatcaaggtgctgcagatatatcagcac

SEQ ID NO: 5741 - RNA, 129 nt, synthetic construct
  source 1..129: mol_type = other RNA
ggaatcccttctgcagcaccgttttagagctagaaatagcaagttaaaataaggctagtccgttatcaacttgaaaaagtggcaccgagtcggtgcaagcgatcaaggtgctgcagactaatcgcagca

SEQ ID NO: 5742 - RNA, 129 nt, synthetic construct
  source 1..129: mol_type = other RNA
ggaatcccttctgcagcaccgttttagagctagaaatagcaagttaaaataaggctagtccgttatcaacttgaaaaagtggcaccgagtcggtgcaagcgatcaaggtgctgcagataagtcgcagca

SEQ ID NO: 5743 - RNA, 128 nt, synthetic construct
  source 1..128: mol_type = other RNA
ggaatcccttctgcagcaccgttttagagctagaaatagcaagttaaaataaggctagtccgttatcaacttgaaaaagtggcaccgagtcggtgcaagcgatcaaggtgctgcagagatattgcagc

SEQ ID NO: 5744 - RNA, 128 nt, synthetic construct
  source 1..128: mol_type = other RNA
ggaatcccttctgcagcaccgttttagagctagaaatagcaagttaaaataaggctagtccgttatcaacttgaaaaagtggcaccgagtcggtgcaagcgatcaaggtgctgcagagcaattgcagc

SEQ ID NO: 5745 - RNA, 129 nt, synthetic construct
  source 1..129: mol_type = other RNA
ggaatcccttctgcagcaccgttttagagctagaaatagcaagttaaaataaggctagtccgttatcaacttgaaaaagtggcaccgagtcggtgcaagcgatcaaggtgctgcagacttacgctgcag

SEQ ID NO: 5746 - RNA, 129 nt, synthetic construct
  source 1..129: mol_type = other RNA
ggaatcccttctgcagcaccgttttagagctagaaatagcaagttaaaataaggctagtccgttatcaacttgaaaaagtggcaccgagtcggtgcaagcgatcaaggtgctgcagacatgggctgcag

SEQ ID NO: 5747 - RNA, 131 nt, synthetic construct
  source 1..131: mol_type = other RNA
ggaatcccttctgcagcaccgttttagagctagaaatagcaagttaaaataaggctagtccgttatcaacttgaaaaagtggcaccgagtcggtgcaagcgatcaaggtgctgcagataggtcgatcgctt

SEQ ID NO: 5748 - RNA, 131 nt, synthetic construct
  source 1..131: mol_type = other RNA
ggaatcccttctgcagcaccgttttagagctagaaatagcaagttaaaataaggctagtccgttatcaacttgaaaaagtggcaccgagtcggtgcaagcgatcaaggtgctgcagatatatcgatcgctt

SEQ ID NO: 5749 - RNA, 131 nt, synthetic construct
  source 1..131: mol_type = other RNA
ggaatcccttctgcagcaccgttttagagctagaaatagcaagttaaaataaggctagtccgttatcaacttgaaaaagtggcaccgagtcggtgcaagcgatcaaggtgctgcagatatgggtgatcgct

SEQ ID NO: 5750 - RNA, 131 nt, synthetic construct
  source 1..131: mol_type = other RNA
ggaatcccttctgcagcaccgttttagagctagaaatagcaagttaaaataaggctagtccgttatcaacttgaaaaagtggcaccgagtcggtgcaagcgatcaaggtgctgcagatatggatgatcgct

SEQ ID NO: 5751 - RNA, 131 nt, synthetic construct
  source 1..131: mol_type = other RNA
ggaatcccttctgcagcaccgttttagagctagaaatagcaagttaaaataaggctagtccgttatcaacttgaaaaagtggcaccgagtcggtgcaagcgatcaaggtgctgcagatatgtgttgatcgc

SEQ ID NO: 5752 - RNA, 131 nt, synthetic construct
  source 1..131: mol_type = other RNA
ggaatcccttctgcagcaccgttttagagctagaaatagcaagttaaaataaggctagtccgttatcaacttgaaaaagtggcaccgagtcggtgcaagcgatcaaggtgctgcagacatgtattgatcgc

SEQ ID NO: 5753 - RNA, 131 nt, synthetic construct
  source 1..131: mol_type = other RNA
ggaatcccttctgcagcaccgttttagagctagaaatagcaagttaaaataaggctagtccgttatcaacttgaaaaagtggcaccgagtcggtgcaagcgatcaaggtgctgcagatatcctcttgatcg

SEQ ID NO: 5754 - RNA, 131 nt, synthetic construct
  source 1..131: mol_type = other RNA
ggaatcccttctgcagcaccgttttagagctagaaatagcaagttaaaataaggctagtccgttatcaacttgaaaaagtggcaccgagtcggtgcaagcgatcaaggtgctgcagataatctcttgatcg

SEQ ID NO: 5755 - RNA, 130 nt, synthetic construct
  source 1..130: mol_type = other RNA
ggaatcccttctgcagcaccgttttagagctagaaatagcaagttaaaataaggctagtccgttatcaacttgaaaaagtggcaccgagtcggtgcaagcgatcaaggtgctgcagacctacccttgatc

SEQ ID NO: 5756 - RNA, 130 nt, synthetic construct
  source 1..130: mol_type = other RNA
ggaatcccttctgcagcaccgttttagagctagaaatagcaagttaaaataaggctagtccgttatcaacttgaaaaagtggcaccgagtcggtgcaagcgatcaaggtgctgcagaccttcccttgatc

SEQ ID NO: 5757 - RNA, 131 nt, synthetic construct
  source 1..131: mol_type = other RNA
ggaatcccttctgcagcaccgttttagagctagaaatagcaagttaaaataaggctagtccgttatcaacttgaaaaagtggcaccgagtcggtgcaagcgatcaaggtgctgcagaccttataccttgat

SEQ ID NO: 5758 - RNA, 131 nt, synthetic construct
  source 1..131: mol_type = other RNA
ggaatcccttctgcagcaccgttttagagctagaaatagcaagttaaaataaggctagtccgttatcaacttgaaaaagtggcaccgagtcggtgcaagcgatcaaggtgctgcagattatataccttgat

SEQ ID NO: 5759 - RNA, 131 nt, synthetic construct
  source 1..131: mol_type = other RNA
ggaatcccttctgcagcaccgttttagagctagaaatagcaagttaaaataaggctagtccgttatcaacttgaaaaagtggcaccgagtcggtgcaagcgatcaaggtgctgcagatctcctcaccttga

SEQ ID NO: 5760 - RNA, 131 nt, synthetic construct
  source 1..131: mol_type = other RNA
ggaatcccttctgcagcaccgttttagagctagaaatagcaagttaaaataaggctagtccgttatcaacttgaaaaagtggcaccgagtcggtgcaagcgatcaaggtgctgcagacctcctcaccttga

SEQ ID NO: 5761 - RNA, 131 nt, synthetic construct
  source 1..131: mol_type = other RNA
ggaatcccttctgcagcaccgttttagagctagaaatagcaagttaaaataaggctagtccgttatcaacttgaaaaagtggcaccgagtcggtgcaagcgatcaaggtgctgcagacaactcgcaccttg

SEQ ID NO: 5762 - RNA, 131 nt, synthetic construct
  source 1..131: mol_type = other RNA
ggaatcccttctgcagcaccgttttagagctagaaatagcaagttaaaataaggctagtccgttatcaacttgaaaaagtggcaccgagtcggtgcaagcgatcaaggtgctgcagattactcgcaccttg

SEQ ID NO: 5763 - RNA, 131 nt, synthetic construct
  source 1..131: mol_type = other RNA
ggaatcccttctgcagcaccgttttagagctagaaatagcaagttaaaataaggctagtccgttatcaacttgaaaaagtggcaccgagtcggtgcaagcgatcaaggtgctgcagagataatagcacctt

SEQ ID NO: 5764 - RNA, 131 nt, synthetic construct
  source 1..131: mol_type = other RNA
ggaatcccttctgcagcaccgttttagagctagaaatagcaagttaaaataaggctagtccgttatcaacttgaaaaagtggcaccgagtcggtgcaagcgatcaaggtgctgcagagagtatagcacctt

SEQ ID NO: 5765 - RNA, 130 nt, synthetic construct
  source 1..130: mol_type = other RNA
ggaatcccttctgcagcaccgttttagagctagaaatagcaagttaaaataaggctagtccgttatcaacttgaaaaagtggcaccgagtcggtgcaagcgatcaaggtgctgcagatcaatcagcacct

SEQ ID NO: 5766 - RNA, 130 nt, synthetic construct
  source 1..130: mol_type = other RNA
ggaatcccttctgcagcaccgttttagagctagaaatagcaagttaaaataaggctagtccgttatcaacttgaaaaagtggcaccgagtcggtgcaagcgatcaaggtgctgcagataaatcagcacct

SEQ ID NO: 5767 - RNA, 131 nt, synthetic construct
  source 1..131: mol_type = other RNA
ggaatcccttctgcagcaccgttttagagctagaaatagcaagttaaaataaggctagtccgttatcaacttgaaaaagtggcaccgagtcggtgcaagcgatcaaggtgctgcagataagtcgcagcacc

SEQ ID NO: 5768 - RNA, 131 nt, synthetic construct
  source 1..131: mol_type = other RNA
ggaatcccttctgcagcaccgttttagagctagaaatagcaagttaaaataaggctagtccgttatcaacttgaaaaagtggcaccgagtcggtgcaagcgatcaaggtgctgcagactagtcgcagcacc

SEQ ID NO: 5769 - RNA, 130 nt, synthetic construct
  source 1..130: mol_type = other RNA
ggaatcccttctgcagcaccgttttagagctagaaatagcaagttaaaataaggctagtccgttatcaacttgaaaaagtggcaccgagtcggtgcaagcgatcaaggtgctgcagagtgattgcagcac

SEQ ID NO: 5770 - RNA, 130 nt, synthetic construct
  source 1..130: mol_type = other RNA
ggaatcccttctgcagcaccgttttagagctagaaatagcaagttaaaataaggctagtccgttatcaacttgaaaaagtggcaccgagtcggtgcaagcgatcaaggtgctgcagaccaattgcagcac

SEQ ID NO: 5771 - RNA, 131 nt, synthetic construct
  source 1..131: mol_type = other RNA
ggaatcccttctgcagcaccgttttagagctagaaatagcaagttaaaataaggctagtccgttatcaacttgaaaaagtggcaccgagtcggtgcaagcgatcaaggtgctgcagacaccggctgcagca

SEQ ID NO: 5772 - RNA, 131 nt, synthetic construct
  source 1..131: mol_type = other RNA
ggaatcccttctgcagcaccgttttagagctagaaatagcaagttaaaataaggctagtccgttatcaacttgaaaaagtggcaccgagtcggtgcaagcgatcaaggtgctgcagactcacgctgcagca

SEQ ID NO: 5773 - RNA, 130 nt, synthetic construct
  source 1..130: mol_type = other RNA
ggaatcccttctgcagcaccgttttagagctagaaatagcaagttaaaataaggctagtccgttatcaacttgaaaaagtggcaccgagtcggtgcaagcgatcaaggtgctgcagatacgatctgcagc

SEQ ID NO: 5774 - RNA, 130 nt, synthetic construct
  source 1..130: mol_type = other RNA
ggaatcccttctgcagcaccgttttagagctagaaatagcaagttaaaataaggctagtccgttatcaacttgaaaaagtggcaccgagtcggtgcaagcgatcaaggtgctgcagatacaatctgcagc

SEQ ID NO: 5775 - RNA, 131 nt, synthetic construct
  source 1..131: mol_type = other RNA
ggctcagccaggtagtactggttttagagctagaaatagcaagttaaaataaggctagtccgttatcaacttgaaaaagtggcaccgagtcggtgcacgcagccccttcgagtacccacagtactacctgg

SEQ ID NO: 5776 - RNA, 141 nt, synthetic construct
  source 1..141: mol_type = other RNA
ggctcagccaggtagtactggttttagagctagaaatagcaagttaaaataaggctagtccgttatcaacttgaaaaagtggcaccgagtcggtgcacgcagccccttcgagtacccacagtactacctggtaccgagcgt

SEQ ID NO: 5777 - RNA, 141 nt, synthetic construct
  source 1..141: mol_type = other RNA
ggctcagccaggtagtactggttttagagctagaaatagcaagttaaaataaggctagtccgttatcaacttgaaaaagtggcaccgagtcggtgcacgcagccccttcgagtacccacagtactacctggtctcgagcgt

SEQ ID NO: 5778 - RNA, 141 nt, synthetic construct
  source 1..141: mol_type = other RNA
ggctcagccaggtagtactggttttagagctagaaatagcaagttaaaataaggctagtccgttatcaacttgaaaaagtggcaccgagtcggtgcacgcagccccttcgagtacccacagtactacctggaacaattgcg

SEQ ID NO: 5779 - RNA, 141 nt, synthetic construct
  source 1..141: mol_type = other RNA
ggctcagccaggtagtactggttttagagctagaaatagcaagttaaaataaggctagtccgttatcaacttgaaaaagtggcaccgagtcggtgcacgcagccccttcgagtacccacagtactacctggaaacattgcg

SEQ ID NO: 5780 - RNA, 141 nt, synthetic construct
  source 1..141: mol_type = other RNA
ggctcagccaggtagtactggttttagagctagaaatagcaagttaaaataaggctagtccgttatcaacttgaaaaagtggcaccgagtcggtgcacgcagccccttcgagtacccacagtactacctggtagtacctgc

SEQ ID NO: 5781 - RNA, 141 nt, synthetic construct
  source 1..141: mol_type = other RNA
ggctcagccaggtagtactggttttagagctagaaatagcaagttaaaataaggctagtccgttatcaacttgaaaaagtggcaccgagtcggtgcacgcagccccttcgagtacccacagtactacctggtatcgactgc

SEQ ID NO: 5782 - RNA, 141 nt, synthetic construct
  source 1..141: mol_type = other RNA
ggctcagccaggtagtactggttttagagctagaaatagcaagttaaaataaggctagtccgttatcaacttgaaaaagtggcaccgagtcggtgcacgcagccccttcgagtacccacagtactacctggatgtacgctg

SEQ ID NO: 5783 - RNA, 141 nt, synthetic construct
  source 1..141: mol_type = other RNA
ggctcagccaggtagtactggttttagagctagaaatagcaagttaaaataaggctagtccgttatcaacttgaaaaagtggcaccgagtcggtgcacgcagccccttcgagtacccacagtactacctggtcgtacgctg

SEQ ID NO: 5784 - RNA, 141 nt, synthetic construct
  source 1..141: mol_type = other RNA
ggctcagccaggtagtactggttttagagctagaaatagcaagttaaaataaggctagtccgttatcaacttgaaaaagtggcaccgagtcggtgcacgcagccccttcgagtacccacagtactacctggtagtacggct

SEQ ID NO: 5785 - RNA, 140 nt, synthetic construct
  source 1..140: mol_type = other RNA
ggctcagccaggtagtactggttttagagctagaaatagcaagttaaaataaggctagtccgttatcaacttgaaaaagtggcaccgagtcggtgcacgcagccccttcgagtacccacagtactacctggtattcggct

SEQ ID NO: 5786 - RNA, 141 nt, synthetic construct
  source 1..141: mol_type = other RNA
ggctcagccaggtagtactggttttagagctagaaatagcaagttaaaataaggctagtccgttatcaacttgaaaaagtggcaccgagtcggtgcacgcagccccttcgagtacccacagtactacctggttcctcgggc

SEQ ID NO: 5787 - RNA, 141 nt, synthetic construct
  source 1..141: mol_type = other RNA
ggctcagccaggtagtactggttttagagctagaaatagcaagttaaaataaggctagtccgttatcaacttgaaaaagtggcaccgagtcggtgcacgcagccccttcgagtacccacagtactacctggtgtgtcgggc

SEQ ID NO: 5788 - RNA, 141 nt, synthetic construct
  source 1..141: mol_type = other RNA
ggctcagccaggtagtactggttttagagctagaaatagcaagttaaaataaggctagtccgttatcaacttgaaaaagtggcaccgagtcggtgcacgcagccccttcgagtacccacagtactacctggttatacgggg

SEQ ID NO: 5789 - RNA, 141 nt, synthetic construct
  source 1..141: mol_type = other RNA
ggctcagccaggtagtactggttttagagctagaaatagcaagttaaaataaggctagtccgttatcaacttgaaaaagtggcaccgagtcggtgcacgcagccccttcgagtacccacagtactacctggtaatacgggg

SEQ ID NO: 5790 - RNA, 141 nt, synthetic construct
  source 1..141: mol_type = other RNA
ggctcagccaggtagtactggttttagagctagaaatagcaagttaaaataaggctagtccgttatcaacttgaaaaagtggcaccgagtcggtgcacgcagccccttcgagtacccacagtactacctggtgacaaaggg

SEQ ID NO: 5791 - RNA, 141 nt, synthetic construct
  source 1..141: mol_type = other RNA
ggctcagccaggtagtactggttttagagctagaaatagcaagttaaaataaggctagtccgttatcaacttgaaaaagtggcaccgagtcggtgcacgcagccccttcgagtacccacagtactacctggattgtaaggg

SEQ ID NO: 5792 - RNA, 141 nt, synthetic construct
  source 1..141: mol_type = other RNA
ggctcagccaggtagtactggttttagagctagaaatagcaagttaaaataaggctagtccgttatcaacttgaaaaagtggcaccgagtcggtgcacgcagccccttcgagtacccacagtactacctggtctactaagg

SEQ ID NO: 5793 - RNA, 141 nt, synthetic construct
  source 1..141: mol_type = other RNA
ggctcagccaggtagtactggttttagagctagaaatagcaagttaaaataaggctagtccgttatcaacttgaaaaagtggcaccgagtcggtgcacgcagccccttcgagtacccacagtactacctggataaagaagg

SEQ ID NO: 5794 - RNA, 141 nt, synthetic construct
  source 1..141: mol_type = other RNA
ggctcagccaggtagtactggttttagagctagaaatagcaagttaaaataaggctagtccgttatcaacttgaaaaagtggcaccgagtcggtgcacgcagccccttcgagtacccacagtactacctggtcgattgaag

SEQ ID NO: 5795 - RNA, 141 nt, synthetic construct
  source 1..141: mol_type = other RNA
ggctcagccaggtagtactggttttagagctagaaatagcaagttaaaataaggctagtccgttatcaacttgaaaaagtggcaccgagtcggtgcacgcagccccttcgagtacccacagtactacctggttcattgaag

SEQ ID NO: 5796 - RNA, 141 nt, synthetic construct
  source 1..141: mol_type = other RNA
ggctcagccaggtagtactggttttagagctagaaatagcaagttaaaataaggctagtccgttatcaacttgaaaaagtggcaccgagtcggtgcacgcagccccttcgagtacccacagtactacctggtagaatcgaa

SEQ ID NO: 5797 - RNA, 141 nt, synthetic construct
  source 1..141: mol_type = other RNA
ggctcagccaggtagtactggttttagagctagaaatagcaagttaaaataaggctagtccgttatcaacttgaaaaagtggcaccgagtcggtgcacgcagccccttcgagtacccacagtactacctggtgagatcgaa

SEQ ID NO: 5798 - RNA, 140 nt, synthetic construct
  source 1..140: mol_type = other RNA
ggctcagccaggtagtactggttttagagctagaaatagcaagttaaaataaggctagtccgttatcaacttgaaaaagtggcaccgagtcggtgcacgcagccccttcgagtacccacagtactacctggtcaattcga

SEQ ID NO: 5799 - RNA, 140 nt, synthetic construct
  source 1..140: mol_type = other RNA
ggctcagccaggtagtactggttttagagctagaaatagcaagttaaaataaggctagtccgttatcaacttgaaaaagtggcaccgagtcggtgcacgcagccccttcgagtacccacagtactacctggatcattcga

SEQ ID NO: 5800 - RNA, 141 nt, synthetic construct
  source 1..141: mol_type = other RNA
ggctcagccaggtagtactggttttagagctagaaatagcaagttaaaataaggctagtccgttatcaacttgaaaaagtggcaccgagtcggtgcacgcagccccttcgagtacccacagtactacctggtcgagtctcg

SEQ ID NO: 5801 - RNA, 141 nt, synthetic construct
  source 1..141: mol_type = other RNA
ggctcagccaggtagtactggttttagagctagaaatagcaagttaaaataaggctagtccgttatcaacttgaaaaagtggcaccgagtcggtgcacgcagccccttcgagtacccacagtactacctggtagagtctcg

SEQ ID NO: 5802 - RNA, 141 nt, synthetic construct
  source 1..141: mol_type = other RNA
ggctcagccaggtagtactggttttagagctagaaatagcaagttaaaataaggctagtccgttatcaacttgaaaaagtggcaccgagtcggtgcacgcagccccttcgagtacccacagtactacctggtattatactc

SEQ ID NO: 5803 - RNA, 141 nt, synthetic construct
  source 1..141: mol_type = other RNA
ggctcagccaggtagtactggttttagagctagaaatagcaagttaaaataaggctagtccgttatcaacttgaaaaagtggcaccgagtcggtgcacgcagccccttcgagtacccacagtactacctggtccgatactc

SEQ ID NO: 5804 - RNA, 141 nt, synthetic construct
  source 1..141: mol_type = other RNA
ggctcagccaggtagtactggttttagagctagaaatagcaagttaaaataaggctagtccgttatcaacttgaaaaagtggcaccgagtcggtgcacgcagccccttcgagtacccacagtactacctggtcagagtact

SEQ ID NO: 5805 - RNA, 141 nt, synthetic construct
  source 1..141: mol_type = other RNA
ggctcagccaggtagtactggttttagagctagaaatagcaagttaaaataaggctagtccgttatcaacttgaaaaagtggcaccgagtcggtgcacgcagccccttcgagtacccacagtactacctggtataagtact

SEQ ID NO: 5806 - RNA, 141 nt, synthetic construct
  source 1..141: mol_type = other RNA
ggctcagccaggtagtactggttttagagctagaaatagcaagttaaaataaggctagtccgttatcaacttgaaaaagtggcaccgagtcggtgcacgcagccccttcgagtacccacagtactacctggaagtacgtac

SEQ ID NO: 5807 - RNA, 138 nt, synthetic construct
  source 1..138: mol_type = other RNA
ggctcagccaggtagtactggttttagagctagaaatagcaagttaaaataaggctagtccgttatcaacttgaaaaagtggcaccgagtcggtgcacgcagccccttcgagtacccacagtactacctggtacgtac

SEQ ID NO: 5808 - RNA, 141 nt, synthetic construct
  source 1..141: mol_type = other RNA
ggctcagccaggtagtactggttttagagctagaaatagcaagttaaaataaggctagtccgttatcaacttgaaaaagtggcaccgagtcggtgcacgcagccccttcgagtacccacagtactacctggacgtacggta

SEQ ID NO: 5809 - RNA, 140 nt, synthetic construct
  source 1..140: mol_type = other RNA
ggctcagccaggtagtactggttttagagctagaaatagcaagttaaaataaggctagtccgttatcaacttgaaaaagtggcaccgagtcggtgcacgcagccccttcgagtacccacagtactacctggtagacggta

SEQ ID NO: 5810 - RNA, 141 nt, synthetic construct
  source 1..141: mol_type = other RNA
ggctcagccaggtagtactggttttagagctagaaatagcaagttaaaataaggctagtccgttatcaacttgaaaaagtggcaccgagtcggtgcacgcagccccttcgagtacccacagtactacctggtgatatgggt

SEQ ID NO: 5811 - RNA, 141 nt, synthetic construct
  source 1..141: mol_type = other RNA
ggctcagccaggtagtactggttttagagctagaaatagcaagttaaaataaggctagtccgttatcaacttgaaaaagtggcaccgagtcggtgcacgcagccccttcgagtacccacagtactacctggtgacatgggt

SEQ ID NO: 5812 - RNA, 141 nt, synthetic construct
  source 1..141: mol_type = other RNA
ggctcagccaggtagtactggttttagagctagaaatagcaagttaaaataaggctagtccgttatcaacttgaaaaagtggcaccgagtcggtgcacgcagccccttcgagtacccacagtactacctggatagtatggg

SEQ ID NO: 5813 - RNA, 141 nt, synthetic construct
  source 1..141: mol_type = other RNA
ggctcagccaggtagtactggttttagagctagaaatagcaagttaaaataaggctagtccgttatcaacttgaaaaagtggcaccgagtcggtgcacgcagccccttcgagtacccacagtactacctggacaacgtggg

SEQ ID NO: 5814 - RNA, 141 nt, synthetic construct
  source 1..141: mol_type = other RNA
ggctcagccaggtagtactggttttagagctagaaatagcaagttaaaataaggctagtccgttatcaacttgaaaaagtggcaccgagtcggtgcacgcagccccttcgagtacccacagtactacctggacgtacgtgg

SEQ ID NO: 5815 - RNA, 140 nt, synthetic construct
  source 1..140: mol_type = other RNA
ggctcagccaggtagtactggttttagagctagaaatagcaagttaaaataaggctagtccgttatcaacttgaaaaagtggcaccgagtcggtgcacgcagccccttcgagtacccacagtactacctggtagacgtgg

SEQ ID NO: 5816 - RNA, 141 nt, synthetic construct
  source 1..141: mol_type = other RNA
ggctcagccaggtagtactggttttagagctagaaatagcaagttaaaataaggctagtccgttatcaacttgaaaaagtggcaccgagtcggtgcacgcagccccttcgagtacccacagtactacctggaagtattgtg

SEQ ID NO: 5817 - RNA, 141 nt, synthetic construct
  source 1..141: mol_type = other RNA
ggctcagccaggtagtactggttttagagctagaaatagcaagttaaaataaggctagtccgttatcaacttgaaaaagtggcaccgagtcggtgcacgcagccccttcgagtacccacagtactacctggtcgtactgtg

SEQ ID NO: 5818 - RNA, 141 nt, synthetic construct
  source 1..141: mol_type = other RNA
ggctcagccaggtagtactggttttagagctagaaatagcaagttaaaataaggctagtccgttatcaacttgaaaaagtggcaccgagtcggtgcacgcagccccttcgagtacccacagtactacctggaccgtactgt

SEQ ID NO: 5819 - RNA, 141 nt, synthetic construct
  source 1..141: mol_type = other RNA
ggctcagccaggtagtactggttttagagctagaaatagcaagttaaaataaggctagtccgttatcaacttgaaaaagtggcaccgagtcggtgcacgcagccccttcgagtacccacagtactacctggaacgtactgt

SEQ ID NO: 5820 - RNA, 141 nt, synthetic construct
  source 1..141: mol_type = other RNA
ggctcagccaggtagtactggttttagagctagaaatagcaagttaaaataaggctagtccgttatcaacttgaaaaagtggcaccgagtcggtgcacgcagccccttcgagtacccacagtactacctggacgtatactg

SEQ ID NO: 5821 - RNA, 141 nt, synthetic construct
  source 1..141: mol_type = other RNA
ggctcagccaggtagtactggttttagagctagaaatagcaagttaaaataaggctagtccgttatcaacttgaaaaagtggcaccgagtcggtgcacgcagccccttcgagtacccacagtactacctggatagatactg

SEQ ID NO: 5822 - RNA, 141 nt, synthetic construct
  source 1..141: mol_type = other RNA
ggctcagccaggtagtactggttttagagctagaaatagcaagttaaaataaggctagtccgttatcaacttgaaaaagtggcaccgagtcggtgcacgcagccccttcgagtacccacagtactacctggtaatagtact

SEQ ID NO: 5823 - RNA, 141 nt, synthetic construct
  source 1..141: mol_type = other RNA
ggctcagccaggtagtactggttttagagctagaaatagcaagttaaaataaggctagtccgttatcaacttgaaaaagtggcaccgagtcggtgcacgcagccccttcgagtacccacagtactacctggtcatagtact

SEQ ID NO: 5824 - RNA, 140 nt, synthetic construct
  source 1..140: mol_type = other RNA
ggctcagccaggtagtactggttttagagctagaaatagcaagttaaaataaggctagtccgttatcaacttgaaaaagtggcaccgagtcggtgcacgcagccccttcgagtacccacagtactacctggtaatagtac

SEQ ID NO: 5825 - RNA, 140 nt, synthetic construct
  source 1..140: mol_type = other RNA
ggctcagccaggtagtactggttttagagctagaaatagcaagttaaaataaggctagtccgttatcaacttgaaaaagtggcaccgagtcggtgcacgcagccccttcgagtacccacagtactacctggtcatagtac

SEQ ID NO: 5826 - RNA, 140 nt, synthetic construct
  source 1..140: mol_type = other RNA
ggctcagccaggtagtactggttttagagctagaaatagcaagttaaaataaggctagtccgttatcaacttgaaaaagtggcaccgagtcggtgcacgcagccccttcgagtacccacagtactacctggtaagtagta

SEQ ID NO: 5827 - RNA, 140 nt, synthetic construct
  source 1..140: mol_type = other RNA
ggctcagccaggtagtactggttttagagctagaaatagcaagttaaaataaggctagtccgttatcaacttgaaaaagtggcaccgagtcggtgcacgcagccccttcgagtacccacagtactacctggtcagtagta

SEQ ID NO: 5828 - RNA, 141 nt, synthetic construct
  source 1..141: mol_type = other RNA
ggctcagccaggtagtactggttttagagctagaaatagcaagttaaaataaggctagtccgttatcaacttgaaaaagtggcaccgagtcggtgcacgcagccccttcgagtacccacagtactacctggtgtaggtagt

SEQ ID NO: 5829 - RNA, 141 nt, synthetic construct
  source 1..141: mol_type = other RNA
ggctcagccaggtagtactggttttagagctagaaatagcaagttaaaataaggctagtccgttatcaacttgaaaaagtggcaccgagtcggtgcacgcagccccttcgagtacccacagtactacctggtctaggtagt

SEQ ID NO: 5830 - RNA, 141 nt, synthetic construct
  source 1..141: mol_type = other RNA
ggctcagccaggtagtactggttttagagctagaaatagcaagttaaaataaggctagtccgttatcaacttgaaaaagtggcaccgagtcggtgcacgcagccccttcgagtacccacagtactacctggttaccggtag

SEQ ID NO: 5831 - RNA, 141 nt, synthetic construct
  source 1..141: mol_type = other RNA
ggctcagccaggtagtactggttttagagctagaaatagcaagttaaaataaggctagtccgttatcaacttgaaaaagtggcaccgagtcggtgcacgcagccccttcgagtacccacagtactacctggtagtacgtag

SEQ ID NO: 5832 - RNA, 140 nt, synthetic construct
  source 1..140: mol_type = other RNA
ggctcagccaggtagtactggttttagagctagaaatagcaagttaaaataaggctagtccgttatcaacttgaaaaagtggcaccgagtcggtgcacgcagccccttcgagtacccacagtactacctggtcggtggta

SEQ ID NO: 5833 - RNA, 141 nt, synthetic construct
  source 1..141: mol_type = other RNA
ggctcagccaggtagtactggttttagagctagaaatagcaagttaaaataaggctagtccgttatcaacttgaaaaagtggcaccgagtcggtgcacgcagccccttcgagtacccacagtactacctggttcggtggta

SEQ ID NO: 5834 - RNA, 140 nt, synthetic construct
  source 1..140: mol_type = other RNA
ggctcagccaggtagtactggttttagagctagaaatagcaagttaaaataaggctagtccgttatcaacttgaaaaagtggcaccgagtcggtgcacgcagccccttcgagtacccacagtactacctggtaattaggt

SEQ ID NO: 5835 - RNA, 140 nt, synthetic construct
  source 1..140: mol_type = other RNA
ggctcagccaggtagtactggttttagagctagaaatagcaagttaaaataaggctagtccgttatcaacttgaaaaagtggcaccgagtcggtgcacgcagccccttcgagtacccacagtactacctggtgattaggt

SEQ ID NO: 5836 - RNA, 141 nt, synthetic construct
  source 1..141: mol_type = other RNA
ggctcagccaggtagtactggttttagagctagaaatagcaagttaaaataaggctagtccgttatcaacttgaaaaagtggcaccgagtcggtgcacgcagccccttcgagtacccacagtactacctggaagaatcagg

SEQ ID NO: 5837 - RNA, 141 nt, synthetic construct
  source 1..141: mol_type = other RNA
ggctcagccaggtagtactggttttagagctagaaatagcaagttaaaataaggctagtccgttatcaacttgaaaaagtggcaccgagtcggtgcacgcagccccttcgagtacccacagtactacctggagacatcagg

SEQ ID NO: 5838 - RNA, 140 nt, synthetic construct
  source 1..140: mol_type = other RNA
ggctcagccaggtagtactggttttagagctagaaatagcaagttaaaataaggctagtccgttatcaacttgaaaaagtggcaccgagtcggtgcacgcagccccttcgagtacccacagtactacctggtaacaccag

SEQ ID NO: 5839 - RNA, 140 nt, synthetic construct
  source 1..140: mol_type = other RNA
ggctcagccaggtagtactggttttagagctagaaatagcaagttaaaataaggctagtccgttatcaacttgaaaaagtggcaccgagtcggtgcacgcagccccttcgagtacccacagtactacctggtcacaccag

SEQ ID NO: 5840 - RNA, 143 nt, synthetic construct
  source 1..143: mol_type = other RNA
ggctcagccaggtagtactggttttagagctagaaatagcaagttaaaataaggctagtccgttatcaacttgaaaaagtggcaccgagtcggtgcacgcagccccttcgagtacccacagtactacctggtagtacctgcgt

SEQ ID NO: 5841 - RNA, 143 nt, synthetic construct
  source 1..143: mol_type = other RNA
ggctcagccaggtagtactggttttagagctagaaatagcaagttaaaataaggctagtccgttatcaacttgaaaaagtggcaccgagtcggtgcacgcagccccttcgagtacccacagtactacctggtatcgactgcgt

SEQ ID NO: 5842 - RNA, 143 nt, synthetic construct
  source 1..143: mol_type = other RNA
ggctcagccaggtagtactggttttagagctagaaatagcaagttaaaataaggctagtccgttatcaacttgaaaaagtggcaccgagtcggtgcacgcagccccttcgagtacccacagtactacctggtcgtacgctgcg

SEQ ID NO: 5843 - RNA, 143 nt, synthetic construct
  source 1..143: mol_type = other RNA
ggctcagccaggtagtactggttttagagctagaaatagcaagttaaaataaggctagtccgttatcaacttgaaaaagtggcaccgagtcggtgcacgcagccccttcgagtacccacagtactacctggatgtacgctgcg

SEQ ID NO: 5844 - RNA, 143 nt, synthetic construct
  source 1..143: mol_type = other RNA
ggctcagccaggtagtactggttttagagctagaaatagcaagttaaaataaggctagtccgttatcaacttgaaaaagtggcaccgagtcggtgcacgcagccccttcgagtacccacagtactacctggtagtgcggctgc

SEQ ID NO: 5845 - RNA, 143 nt, synthetic construct
  source 1..143: mol_type = other RNA
ggctcagccaggtagtactggttttagagctagaaatagcaagttaaaataaggctagtccgttatcaacttgaaaaagtggcaccgagtcggtgcacgcagccccttcgagtacccacagtactacctggtagtacggctgc

SEQ ID NO: 5846 - RNA, 143 nt, synthetic construct
  source 1..143: mol_type = other RNA
ggctcagccaggtagtactggttttagagctagaaatagcaagttaaaataaggctagtccgttatcaacttgaaaaagtggcaccgagtcggtgcacgcagccccttcgagtacccacagtactacctgggcagtagggctg

SEQ ID NO: 5847 - RNA, 143 nt, synthetic construct
  source 1..143: mol_type = other RNA
ggctcagccaggtagtactggttttagagctagaaatagcaagttaaaataaggctagtccgttatcaacttgaaaaagtggcaccgagtcggtgcacgcagccccttcgagtacccacagtactacctgggcccctgggctg

SEQ ID NO: 5848 - RNA, 143 nt, synthetic construct
  source 1..143: mol_type = other RNA
ggctcagccaggtagtactggttttagagctagaaatagcaagttaaaataaggctagtccgttatcaacttgaaaaagtggcaccgagtcggtgcacgcagccccttcgagtacccacagtactacctggttatacggggct

SEQ ID NO: 5849 - RNA, 143 nt, synthetic construct
  source 1..143: mol_type = other RNA
ggctcagccaggtagtactggttttagagctagaaatagcaagttaaaataaggctagtccgttatcaacttgaaaaagtggcaccgagtcggtgcacgcagccccttcgagtacccacagtactacctggtcatgcggggct

SEQ ID NO: 5850 - RNA, 143 nt, synthetic construct
  source 1..143: mol_type = other RNA
ggctcagccaggtagtactggttttagagctagaaatagcaagttaaaataaggctagtccgttatcaacttgaaaaagtggcaccgagtcggtgcacgcagccccttcgagtacccacagtactacctggagcaacaggggc

SEQ ID NO: 5851 - RNA, 143 nt, synthetic construct
  source 1..143: mol_type = other RNA
ggctcagccaggtagtactggttttagagctagaaatagcaagttaaaataaggctagtccgttatcaacttgaaaaagtggcaccgagtcggtgcacgcagccccttcgagtacccacagtactacctggagaatcaggggc

SEQ ID NO: 5852 - RNA, 143 nt, synthetic construct
  source 1..143: mol_type = other RNA
ggctcagccaggtagtactggttttagagctagaaatagcaagttaaaataaggctagtccgttatcaacttgaaaaagtggcaccgagtcggtgcacgcagccccttcgagtacccacagtactacctggatgagcaagggg

SEQ ID NO: 5853 - RNA, 143 nt, synthetic construct
  source 1..143: mol_type = other RNA
ggctcagccaggtagtactggttttagagctagaaatagcaagttaaaataaggctagtccgttatcaacttgaaaaagtggcaccgagtcggtgcacgcagccccttcgagtacccacagtactacctggttgagcaagggg

SEQ ID NO: 5854 - RNA, 142 nt, synthetic construct
  source 1..142: mol_type = other RNA
ggctcagccaggtagtactggttttagagctagaaatagcaagttaaaataaggctagtccgttatcaacttgaaaaagtggcaccgagtcggtgcacgcagccccttcgagtacccacagtactacctggattaggaaggg

SEQ ID NO: 5855 - RNA, 143 nt, synthetic construct
  source 1..143: mol_type = other RNA
ggctcagccaggtagtactggttttagagctagaaatagcaagttaaaataaggctagtccgttatcaacttgaaaaagtggcaccgagtcggtgcacgcagccccttcgagtacccacagtactacctggacagtagaaggg

SEQ ID NO: 5856 - RNA, 142 nt, synthetic construct
  source 1..142: mol_type = other RNA
ggctcagccaggtagtactggttttagagctagaaatagcaagttaaaataaggctagtccgttatcaacttgaaaaagtggcaccgagtcggtgcacgcagccccttcgagtacccacagtactacctggacctccgaagg

SEQ ID NO: 5857 - RNA, 142 nt, synthetic construct
  source 1..142: mol_type = other RNA
ggctcagccaggtagtactggttttagagctagaaatagcaagttaaaataaggctagtccgttatcaacttgaaaaagtggcaccgagtcggtgcacgcagccccttcgagtacccacagtactacctggtcatccgaagg

SEQ ID NO: 5858 - RNA, 140 nt, synthetic construct
  source 1..140: mol_type = other RNA
ggctcagccaggtagtactggttttagagctagaaatagcaagttaaaataaggctagtccgttatcaacttgaaaaagtggcaccgagtcggtgcacgcagccccttcgagtacccacagtactacctggacttcgaag

SEQ ID NO: 5859 - RNA, 141 nt, synthetic construct
  source 1..141: mol_type = other RNA
ggctcagccaggtagtactggttttagagctagaaatagcaagttaaaataaggctagtccgttatcaacttgaaaaagtggcaccgagtcggtgcacgcagccccttcgagtacccacagtactacctggttcttcgaag

SEQ ID NO: 5860 - RNA, 143 nt, synthetic construct
  source 1..143: mol_type = other RNA
ggctcagccaggtagtactggttttagagctagaaatagcaagttaaaataaggctagtccgttatcaacttgaaaaagtggcaccgagtcggtgcacgcagccccttcgagtacccacagtactacctggttatgtctcgaa

SEQ ID NO: 5861 - RNA, 143 nt, synthetic construct
  source 1..143: mol_type = other RNA
ggctcagccaggtagtactggttttagagctagaaatagcaagttaaaataaggctagtccgttatcaacttgaaaaagtggcaccgagtcggtgcacgcagccccttcgagtacccacagtactacctggatacgtctcgaa

SEQ ID NO: 5862 - RNA, 143 nt, synthetic construct
  source 1..143: mol_type = other RNA
ggctcagccaggtagtactggttttagagctagaaatagcaagttaaaataaggctagtccgttatcaacttgaaaaagtggcaccgagtcggtgcacgcagccccttcgagtacccacagtactacctggtagtagactcga

SEQ ID NO: 5863 - RNA, 140 nt, synthetic construct
  source 1..140: mol_type = other RNA
ggctcagccaggtagtactggttttagagctagaaatagcaagttaaaataaggctagtccgttatcaacttgaaaaagtggcaccgagtcggtgcacgcagccccttcgagtacccacagtactacctggtacactcga

SEQ ID NO: 5864 - RNA, 143 nt, synthetic construct
  source 1..143: mol_type = other RNA
ggctcagccaggtagtactggttttagagctagaaatagcaagttaaaataaggctagtccgttatcaacttgaaaaagtggcaccgagtcggtgcacgcagccccttcgagtacccacagtactacctggactagttactcg

SEQ ID NO: 5865 - RNA, 143 nt, synthetic construct
  source 1..143: mol_type = other RNA
ggctcagccaggtagtactggttttagagctagaaatagcaagttaaaataaggctagtccgttatcaacttgaaaaagtggcaccgagtcggtgcacgcagccccttcgagtacccacagtactacctggaagtattactcg

SEQ ID NO: 5866 - RNA, 143 nt, synthetic construct
  source 1..143: mol_type = other RNA
ggctcagccaggtagtactggttttagagctagaaatagcaagttaaaataaggctagtccgttatcaacttgaaaaagtggcaccgagtcggtgcacgcagccccttcgagtacccacagtactacctggacgtacgtactc

SEQ ID NO: 5867 - RNA, 142 nt, synthetic construct
  source 1..142: mol_type = other RNA
ggctcagccaggtagtactggttttagagctagaaatagcaagttaaaataaggctagtccgttatcaacttgaaaaagtggcaccgagtcggtgcacgcagccccttcgagtacccacagtactacctggtagacgtactc

SEQ ID NO: 5868 - RNA, 143 nt, synthetic construct
  source 1..143: mol_type = other RNA
ggctcagccaggtagtactggttttagagctagaaatagcaagttaaaataaggctagtccgttatcaacttgaaaaagtggcaccgagtcggtgcacgcagccccttcgagtacccacagtactacctggaatactggtact

SEQ ID NO: 5869 - RNA, 143 nt, synthetic construct
  source 1..143: mol_type = other RNA
ggctcagccaggtagtactggttttagagctagaaatagcaagttaaaataaggctagtccgttatcaacttgaaaaagtggcaccgagtcggtgcacgcagccccttcgagtacccacagtactacctggagatacggtact

SEQ ID NO: 5870 - RNA, 143 nt, synthetic construct
  source 1..143: mol_type = other RNA
ggctcagccaggtagtactggttttagagctagaaatagcaagttaaaataaggctagtccgttatcaacttgaaaaagtggcaccgagtcggtgcacgcagccccttcgagtacccacagtactacctggaaagacgggtac

SEQ ID NO: 5871 - RNA, 143 nt, synthetic construct
  source 1..143: mol_type = other RNA
ggctcagccaggtagtactggttttagagctagaaatagcaagttaaaataaggctagtccgttatcaacttgaaaaagtggcaccgagtcggtgcacgcagccccttcgagtacccacagtactacctggaaggacgggtac

SEQ ID NO: 5872 - RNA, 143 nt, synthetic construct
  source 1..143: mol_type = other RNA
ggctcagccaggtagtactggttttagagctagaaatagcaagttaaaataaggctagtccgttatcaacttgaaaaagtggcaccgagtcggtgcacgcagccccttcgagtacccacagtactacctggaatgtatgggta

SEQ ID NO: 5873 - RNA, 143 nt, synthetic construct
  source 1..143: mol_type = other RNA
ggctcagccaggtagtactggttttagagctagaaatagcaagttaaaataaggctagtccgttatcaacttgaaaaagtggcaccgagtcggtgcacgcagccccttcgagtacccacagtactacctggacgtcttgggta

SEQ ID NO: 5874 - RNA, 143 nt, synthetic construct
  source 1..143: mol_type = other RNA
ggctcagccaggtagtactggttttagagctagaaatagcaagttaaaataaggctagtccgttatcaacttgaaaaagtggcaccgagtcggtgcacgcagccccttcgagtacccacagtactacctggaataacgtgggt

SEQ ID NO: 5875 - RNA, 143 nt, synthetic construct
  source 1..143: mol_type = other RNA
ggctcagccaggtagtactggttttagagctagaaatagcaagttaaaataaggctagtccgttatcaacttgaaaaagtggcaccgagtcggtgcacgcagccccttcgagtacccacagtactacctggacaaacgtgggt

SEQ ID NO: 5876 - RNA, 143 nt, synthetic construct
  source 1..143: mol_type = other RNA
ggctcagccaggtagtactggttttagagctagaaatagcaagttaaaataaggctagtccgttatcaacttgaaaaagtggcaccgagtcggtgcacgcagccccttcgagtacccacagtactacctggaaaccatgtggg

SEQ ID NO: 5877 - RNA, 143 nt, synthetic construct
  source 1..143: mol_type = other RNA
ggctcagccaggtagtactggttttagagctagaaatagcaagttaaaataaggctagtccgttatcaacttgaaaaagtggcaccgagtcggtgcacgcagccccttcgagtacccacagtactacctggaatccatgtggg

SEQ ID NO: 5878 - RNA, 143 nt, synthetic construct
  source 1..143: mol_type = other RNA
ggctcagccaggtagtactggttttagagctagaaatagcaagttaaaataaggctagtccgttatcaacttgaaaaagtggcaccgagtcggtgcacgcagccccttcgagtacccacagtactacctggtacgaactgtgg

SEQ ID NO: 5879 - RNA, 143 nt, synthetic construct
  source 1..143: mol_type = other RNA
ggctcagccaggtagtactggttttagagctagaaatagcaagttaaaataaggctagtccgttatcaacttgaaaaagtggcaccgagtcggtgcacgcagccccttcgagtacccacagtactacctggtatgaactgtgg

SEQ ID NO: 5880 - RNA, 143 nt, synthetic construct
  source 1..143: mol_type = other RNA
ggctcagccaggtagtactggttttagagctagaaatagcaagttaaaataaggctagtccgttatcaacttgaaaaagtggcaccgagtcggtgcacgcagccccttcgagtacccacagtactacctggatagttactgtg

SEQ ID NO: 5881 - RNA, 143 nt, synthetic construct
  source 1..143: mol_type = other RNA
ggctcagccaggtagtactggttttagagctagaaatagcaagttaaaataaggctagtccgttatcaacttgaaaaagtggcaccgagtcggtgcacgcagccccttcgagtacccacagtactacctggacgtatactgtg

SEQ ID NO: 5882 - RNA, 142 nt, synthetic construct
  source 1..142: mol_type = other RNA
ggctcagccaggtagtactggttttagagctagaaatagcaagttaaaataaggctagtccgttatcaacttgaaaaagtggcaccgagtcggtgcacgcagccccttcgagtacccacagtactacctggacgtatactgt

SEQ ID NO: 5883 - RNA, 143 nt, synthetic construct
  source 1..143: mol_type = other RNA
ggctcagccaggtagtactggttttagagctagaaatagcaagttaaaataaggctagtccgttatcaacttgaaaaagtggcaccgagtcggtgcacgcagccccttcgagtacccacagtactacctggattccgtactgt

SEQ ID NO: 5884 - RNA, 143 nt, synthetic construct
  source 1..143: mol_type = other RNA
ggctcagccaggtagtactggttttagagctagaaatagcaagttaaaataaggctagtccgttatcaacttgaaaaagtggcaccgagtcggtgcacgcagccccttcgagtacccacagtactacctggacacccgtactg

SEQ ID NO: 5885 - RNA, 143 nt, synthetic construct
  source 1..143: mol_type = other RNA
ggctcagccaggtagtactggttttagagctagaaatagcaagttaaaataaggctagtccgttatcaacttgaaaaagtggcaccgagtcggtgcacgcagccccttcgagtacccacagtactacctggactcccgtactg

SEQ ID NO: 5886 - RNA, 143 nt, synthetic construct
  source 1..143: mol_type = other RNA
ggctcagccaggtagtactggttttagagctagaaatagcaagttaaaataaggctagtccgttatcaacttgaaaaagtggcaccgagtcggtgcacgcagccccttcgagtacccacagtactacctggtccccctagtac

SEQ ID NO: 5887 - RNA, 143 nt, synthetic construct
  source 1..143: mol_type = other RNA
ggctcagccaggtagtactggttttagagctagaaatagcaagttaaaataaggctagtccgttatcaacttgaaaaagtggcaccgagtcggtgcacgcagccccttcgagtacccacagtactacctggttaccctagtac

SEQ ID NO: 5888 - RNA, 142 nt, synthetic construct
  source 1..142: mol_type = other RNA
ggctcagccaggtagtactggttttagagctagaaatagcaagttaaaataaggctagtccgttatcaacttgaaaaagtggcaccgagtcggtgcacgcagccccttcgagtacccacagtactacctggtcatagtagta

SEQ ID NO: 5889 - RNA, 142 nt, synthetic construct
  source 1..142: mol_type = other RNA
ggctcagccaggtagtactggttttagagctagaaatagcaagttaaaataaggctagtccgttatcaacttgaaaaagtggcaccgagtcggtgcacgcagccccttcgagtacccacagtactacctggtaatagtagta

SEQ ID NO: 5890 - RNA, 143 nt, synthetic construct
  source 1..143: mol_type = other RNA
ggctcagccaggtagtactggttttagagctagaaatagcaagttaaaataaggctagtccgttatcaacttgaaaaagtggcaccgagtcggtgcacgcagccccttcgagtacccacagtactacctggtctaacggtagt

SEQ ID NO: 5891 - RNA, 143 nt, synthetic construct
  source 1..143: mol_type = other RNA
ggctcagccaggtagtactggttttagagctagaaatagcaagttaaaataaggctagtccgttatcaacttgaaaaagtggcaccgagtcggtgcacgcagccccttcgagtacccacagtactacctggacatacggtagt

SEQ ID NO: 5892 - RNA, 140 nt, synthetic construct
  source 1..140: mol_type = other RNA
ggctcagccaggtagtactggttttagagctagaaatagcaagttaaaataaggctagtccgttatcaacttgaaaaagtggcaccgagtcggtgcacgcagccccttcgagtacccacagtactacctggtataggtag

SEQ ID NO: 5893 - RNA, 140 nt, synthetic construct
  source 1..140: mol_type = other RNA
ggctcagccaggtagtactggttttagagctagaaatagcaagttaaaataaggctagtccgttatcaacttgaaaaagtggcaccgagtcggtgcacgcagccccttcgagtacccacagtactacctggattaggtag

SEQ ID NO: 5894 - RNA, 143 nt, synthetic construct
  source 1..143: mol_type = other RNA
ggctcagccaggtagtactggttttagagctagaaatagcaagttaaaataaggctagtccgttatcaacttgaaaaagtggcaccgagtcggtgcacgcagccccttcgagtacccacagtactacctgggttactccaggt

SEQ ID NO: 5895 - RNA, 143 nt, synthetic construct
  source 1..143: mol_type = other RNA
ggctcagccaggtagtactggttttagagctagaaatagcaagttaaaataaggctagtccgttatcaacttgaaaaagtggcaccgagtcggtgcacgcagccccttcgagtacccacagtactacctgggatcgtccaggt

SEQ ID NO: 5896 - RNA, 145 nt, synthetic construct
  source 1..145: mol_type = other RNA
ggctcagccaggtagtactggttttagagctagaaatagcaagttaaaataaggctagtccgttatcaacttgaaaaagtggcaccgagtcggtgcacgcagccccttcgagtacccacagtactacctggtagtgcggctgcgt

SEQ ID NO: 5897 - RNA, 145 nt, synthetic construct
  source 1..145: mol_type = other RNA
ggctcagccaggtagtactggttttagagctagaaatagcaagttaaaataaggctagtccgttatcaacttgaaaaagtggcaccgagtcggtgcacgcagccccttcgagtacccacagtactacctggtagtacggctgcgt

SEQ ID NO: 5898 - RNA, 145 nt, synthetic construct
  source 1..145: mol_type = other RNA
ggctcagccaggtagtactggttttagagctagaaatagcaagttaaaataaggctagtccgttatcaacttgaaaaagtggcaccgagtcggtgcacgcagccccttcgagtacccacagtactacctgggcccctgggctgcg

SEQ ID NO: 5899 - RNA, 145 nt, synthetic construct
  source 1..145: mol_type = other RNA
ggctcagccaggtagtactggttttagagctagaaatagcaagttaaaataaggctagtccgttatcaacttgaaaaagtggcaccgagtcggtgcacgcagccccttcgagtacccacagtactacctggttcctcgggctgcg

SEQ ID NO: 5900 - RNA, 145 nt, synthetic construct
  source 1..145: mol_type = other RNA
ggctcagccaggtagtactggttttagagctagaaatagcaagttaaaataaggctagtccgttatcaacttgaaaaagtggcaccgagtcggtgcacgcagccccttcgagtacccacagtactacctggtaatgcggggctgc

SEQ ID NO: 5901 - RNA, 145 nt, synthetic construct
  source 1..145: mol_type = other RNA
ggctcagccaggtagtactggttttagagctagaaatagcaagttaaaataaggctagtccgttatcaacttgaaaaagtggcaccgagtcggtgcacgcagccccttcgagtacccacagtactacctggtaatacggggctgc

SEQ ID NO: 5902 - RNA, 145 nt, synthetic construct
  source 1..145: mol_type = other RNA
ggctcagccaggtagtactggttttagagctagaaatagcaagttaaaataaggctagtccgttatcaacttgaaaaagtggcaccgagtcggtgcacgcagccccttcgagtacccacagtactacctggagccacaggggctg

SEQ ID NO: 5903 - RNA, 145 nt, synthetic construct
  source 1..145: mol_type = other RNA
ggctcagccaggtagtactggttttagagctagaaatagcaagttaaaataaggctagtccgttatcaacttgaaaaagtggcaccgagtcggtgcacgcagccccttcgagtacccacagtactacctggagcaacaggggctg

SEQ ID NO: 5904 - RNA, 145 nt, synthetic construct
  source 1..145: mol_type = other RNA
ggctcagccaggtagtactggttttagagctagaaatagcaagttaaaataaggctagtccgttatcaacttgaaaaagtggcaccgagtcggtgcacgcagccccttcgagtacccacagtactacctggatgagcaaggggct

SEQ ID NO: 5905 - RNA, 145 nt, synthetic construct
  source 1..145: mol_type = other RNA
ggctcagccaggtagtactggttttagagctagaaatagcaagttaaaataaggctagtccgttatcaacttgaaaaagtggcaccgagtcggtgcacgcagccccttcgagtacccacagtactacctggttgagcaaggggct

SEQ ID NO: 5906 - RNA, 144 nt, synthetic construct
  source 1..144: mol_type = other RNA
ggctcagccaggtagtactggttttagagctagaaatagcaagttaaaataaggctagtccgttatcaacttgaaaaagtggcaccgagtcggtgcacgcagccccttcgagtacccacagtactacctggattaggaaggggc

SEQ ID NO: 5907 - RNA, 145 nt, synthetic construct
  source 1..145: mol_type = other RNA
ggctcagccaggtagtactggttttagagctagaaatagcaagttaaaataaggctagtccgttatcaacttgaaaaagtggcaccgagtcggtgcacgcagccccttcgagtacccacagtactacctggacagtagaaggggc

SEQ ID NO: 5908 - RNA, 144 nt, synthetic construct
  source 1..144: mol_type = other RNA
ggctcagccaggtagtactggttttagagctagaaatagcaagttaaaataaggctagtccgttatcaacttgaaaaagtggcaccgagtcggtgcacgcagccccttcgagtacccacagtactacctggaattccgaagggg

SEQ ID NO: 5909 - RNA, 144 nt, synthetic construct
  source 1..144: mol_type = other RNA
ggctcagccaggtagtactggttttagagctagaaatagcaagttaaaataaggctagtccgttatcaacttgaaaaagtggcaccgagtcggtgcacgcagccccttcgagtacccacagtactacctggacttccgaagggg

SEQ ID NO: 5910 - RNA, 140 nt, synthetic construct
  source 1..140: mol_type = other RNA
ggctcagccaggtagtactggttttagagctagaaatagcaagttaaaataaggctagtccgttatcaacttgaaaaagtggcaccgagtcggtgcacgcagccccttcgagtacccacagtactacctggttcgaaggg

SEQ ID NO: 5911 - RNA, 142 nt, synthetic construct
  source 1..142: mol_type = other RNA
ggctcagccaggtagtactggttttagagctagaaatagcaagttaaaataaggctagtccgttatcaacttgaaaaagtggcaccgagtcggtgcacgcagccccttcgagtacccacagtactacctggacttcgaaggg

SEQ ID NO: 5912 - RNA, 145 nt, synthetic construct
  source 1..145: mol_type = other RNA
ggctcagccaggtagtactggttttagagctagaaatagcaagttaaaataaggctagtccgttatcaacttgaaaaagtggcaccgagtcggtgcacgcagccccttcgagtacccacagtactacctggaaacgtctcgaagg

SEQ ID NO: 5913 - RNA, 145 nt, synthetic construct
  source 1..145: mol_type = other RNA
ggctcagccaggtagtactggttttagagctagaaatagcaagttaaaataaggctagtccgttatcaacttgaaaaagtggcaccgagtcggtgcacgcagccccttcgagtacccacagtactacctggtaaagtctcgaagg

SEQ ID NO: 5914 - RNA, 142 nt, synthetic construct
  source 1..142: mol_type = other RNA
ggctcagccaggtagtactggttttagagctagaaatagcaagttaaaataaggctagtccgttatcaacttgaaaaagtggcaccgagtcggtgcacgcagccccttcgagtacccacagtactacctggtacactcgaag

SEQ ID NO: 5915 - RNA, 145 nt, synthetic construct
  source 1..145: mol_type = other RNA
ggctcagccaggtagtactggttttagagctagaaatagcaagttaaaataaggctagtccgttatcaacttgaaaaagtggcaccgagtcggtgcacgcagccccttcgagtacccacagtactacctggtagtagactcgaag

SEQ ID NO: 5916 - RNA, 145 nt, synthetic construct
  source 1..145: mol_type = other RNA
ggctcagccaggtagtactggttttagagctagaaatagcaagttaaaataaggctagtccgttatcaacttgaaaaagtggcaccgagtcggtgcacgcagccccttcgagtacccacagtactacctggacatgttactcgaa

SEQ ID NO: 5917 - RNA, 145 nt, synthetic construct
  source 1..145: mol_type = other RNA
ggctcagccaggtagtactggttttagagctagaaatagcaagttaaaataaggctagtccgttatcaacttgaaaaagtggcaccgagtcggtgcacgcagccccttcgagtacccacagtactacctggactcgttactcgaa

SEQ ID NO: 5918 - RNA, 145 nt, synthetic construct
  source 1..145: mol_type = other RNA
ggctcagccaggtagtactggttttagagctagaaatagcaagttaaaataaggctagtccgttatcaacttgaaaaagtggcaccgagtcggtgcacgcagccccttcgagtacccacagtactacctggatagtagtactcga

SEQ ID NO: 5919 - RNA, 145 nt, synthetic construct
  source 1..145: mol_type = other RNA
ggctcagccaggtagtactggttttagagctagaaatagcaagttaaaataaggctagtccgttatcaacttgaaaaagtggcaccgagtcggtgcacgcagccccttcgagtacccacagtactacctggacgtacgtactcga

SEQ ID NO: 5920 - RNA, 145 nt, synthetic construct
  source 1..145: mol_type = other RNA
ggctcagccaggtagtactggttttagagctagaaatagcaagttaaaataaggctagtccgttatcaacttgaaaaagtggcaccgagtcggtgcacgcagccccttcgagtacccacagtactacctggagtcacggtactcg

SEQ ID NO: 5921 - RNA, 145 nt, synthetic construct
  source 1..145: mol_type = other RNA
ggctcagccaggtagtactggttttagagctagaaatagcaagttaaaataaggctagtccgttatcaacttgaaaaagtggcaccgagtcggtgcacgcagccccttcgagtacccacagtactacctggagttacggtactcg

SEQ ID NO: 5922 - RNA, 145 nt, synthetic construct
  source 1..145: mol_type = other RNA
ggctcagccaggtagtactggttttagagctagaaatagcaagttaaaataaggctagtccgttatcaacttgaaaaagtggcaccgagtcggtgcacgcagccccttcgagtacccacagtactacctggaaggacgggtactc

SEQ ID NO: 5923 - RNA, 145 nt, synthetic construct
  source 1..145: mol_type = other RNA
ggctcagccaggtagtactggttttagagctagaaatagcaagttaaaataaggctagtccgttatcaacttgaaaaagtggcaccgagtcggtgcacgcagccccttcgagtacccacagtactacctggaaagacgggtactc

SEQ ID NO: 5924 - RNA, 145 nt, synthetic construct
  source 1..145: mol_type = other RNA
ggctcagccaggtagtactggttttagagctagaaatagcaagttaaaataaggctagtccgttatcaacttgaaaaagtggcaccgagtcggtgcacgcagccccttcgagtacccacagtactacctgggatgtatgggtact

SEQ ID NO: 5925 - RNA, 145 nt, synthetic construct
  source 1..145: mol_type = other RNA
ggctcagccaggtagtactggttttagagctagaaatagcaagttaaaataaggctagtccgttatcaacttgaaaaagtggcaccgagtcggtgcacgcagccccttcgagtacccacagtactacctggaatgtatgggtact

SEQ ID NO: 5926 - RNA, 145 nt, synthetic construct
  source 1..145: mol_type = other RNA
ggctcagccaggtagtactggttttagagctagaaatagcaagttaaaataaggctagtccgttatcaacttgaaaaagtggcaccgagtcggtgcacgcagccccttcgagtacccacagtactacctggaccgacgtgggtac

SEQ ID NO: 5927 - RNA, 145 nt, synthetic construct
  source 1..145: mol_type = other RNA
ggctcagccaggtagtactggttttagagctagaaatagcaagttaaaataaggctagtccgttatcaacttgaaaaagtggcaccgagtcggtgcacgcagccccttcgagtacccacagtactacctggaaaaacgtgggtac

SEQ ID NO: 5928 - RNA, 145 nt, synthetic construct
  source 1..145: mol_type = other RNA
ggctcagccaggtagtactggttttagagctagaaatagcaagttaaaataaggctagtccgttatcaacttgaaaaagtggcaccgagtcggtgcacgcagccccttcgagtacccacagtactacctggatccgttgtgggta

SEQ ID NO: 5929 - RNA, 145 nt, synthetic construct
  source 1..145: mol_type = other RNA
ggctcagccaggtagtactggttttagagctagaaatagcaagttaaaataaggctagtccgttatcaacttgaaaaagtggcaccgagtcggtgcacgcagccccttcgagtacccacagtactacctggaaacgttgtgggta

SEQ ID NO: 5930 - RNA, 145 nt, synthetic construct
  source 1..145: mol_type = other RNA
ggctcagccaggtagtactggttttagagctagaaatagcaagttaaaataaggctagtccgttatcaacttgaaaaagtggcaccgagtcggtgcacgcagccccttcgagtacccacagtactacctggtctaccctgtgggt

SEQ ID NO: 5931 - RNA, 145 nt, synthetic construct
  source 1..145: mol_type = other RNA
ggctcagccaggtagtactggttttagagctagaaatagcaagttaaaataaggctagtccgttatcaacttgaaaaagtggcaccgagtcggtgcacgcagccccttcgagtacccacagtactacctggactaccctgtgggt

SEQ ID NO: 5932 - RNA, 145 nt, synthetic construct
  source 1..145: mol_type = other RNA
ggctcagccaggtagtactggttttagagctagaaatagcaagttaaaataaggctagtccgttatcaacttgaaaaagtggcaccgagtcggtgcacgcagccccttcgagtacccacagtactacctggaccaccactgtggg

SEQ ID NO: 5933 - RNA, 145 nt, synthetic construct
  source 1..145: mol_type = other RNA
ggctcagccaggtagtactggttttagagctagaaatagcaagttaaaataaggctagtccgttatcaacttgaaaaagtggcaccgagtcggtgcacgcagccccttcgagtacccacagtactacctggaaaaccactgtggg

SEQ ID NO: 5934 - RNA, 145 nt, synthetic construct
  source 1..145: mol_type = other RNA
ggctcagccaggtagtactggttttagagctagaaatagcaagttaaaataaggctagtccgttatcaacttgaaaaagtggcaccgagtcggtgcacgcagccccttcgagtacccacagtactacctggttaccatactgtgg

SEQ ID NO: 5935 - RNA, 144 nt, synthetic construct
  source 1..144: mol_type = other RNA
ggctcagccaggtagtactggttttagagctagaaatagcaagttaaaataaggctagtccgttatcaacttgaaaaagtggcaccgagtcggtgcacgcagccccttcgagtacccacagtactacctggatcgttactgtgg

SEQ ID NO: 5936 - RNA, 145 nt, synthetic construct
  source 1..145: mol_type = other RNA
ggctcagccaggtagtactggttttagagctagaaatagcaagttaaaataaggctagtccgttatcaacttgaaaaagtggcaccgagtcggtgcacgcagccccttcgagtacccacagtactacctggtgacccgtactgtg

SEQ ID NO: 5937 - RNA, 145 nt, synthetic construct
  source 1..145: mol_type = other RNA
ggctcagccaggtagtactggttttagagctagaaatagcaagttaaaataaggctagtccgttatcaacttgaaaaagtggcaccgagtcggtgcacgcagccccttcgagtacccacagtactacctggtagcccgtactgtg

SEQ ID NO: 5938 - RNA, 144 nt, synthetic construct
  source 1..144: mol_type = other RNA
ggctcagccaggtagtactggttttagagctagaaatagcaagttaaaataaggctagtccgttatcaacttgaaaaagtggcaccgagtcggtgcacgcagccccttcgagtacccacagtactacctggtccccagtactgt

SEQ ID NO: 5939 - RNA, 144 nt, synthetic construct
  source 1..144: mol_type = other RNA
ggctcagccaggtagtactggttttagagctagaaatagcaagttaaaataaggctagtccgttatcaacttgaaaaagtggcaccgagtcggtgcacgcagccccttcgagtacccacagtactacctggaatccagtactgt

SEQ ID NO: 5940 - RNA, 145 nt, synthetic construct
  source 1..145: mol_type = other RNA
ggctcagccaggtagtactggttttagagctagaaatagcaagttaaaataaggctagtccgttatcaacttgaaaaagtggcaccgagtcggtgcacgcagccccttcgagtacccacagtactacctggatctcttagtactg

SEQ ID NO: 5941 - RNA, 145 nt, synthetic construct
  source 1..145: mol_type = other RNA
ggctcagccaggtagtactggttttagagctagaaatagcaagttaaaataaggctagtccgttatcaacttgaaaaagtggcaccgagtcggtgcacgcagccccttcgagtacccacagtactacctggagttcttagtactg

SEQ ID NO: 5942 - RNA, 145 nt, synthetic construct
  source 1..145: mol_type = other RNA
ggctcagccaggtagtactggttttagagctagaaatagcaagttaaaataaggctagtccgttatcaacttgaaaaagtggcaccgagtcggtgcacgcagccccttcgagtacccacagtactacctggtaaatagtagtact

SEQ ID NO: 5943 - RNA, 145 nt, synthetic construct
  source 1..145: mol_type = other RNA
ggctcagccaggtagtactggttttagagctagaaatagcaagttaaaataaggctagtccgttatcaacttgaaaaagtggcaccgagtcggtgcacgcagccccttcgagtacccacagtactacctggacgatagtagtact

SEQ ID NO: 5944 - RNA, 145 nt, synthetic construct
  source 1..145: mol_type = other RNA
ggctcagccaggtagtactggttttagagctagaaatagcaagttaaaataaggctagtccgttatcaacttgaaaaagtggcaccgagtcggtgcacgcagccccttcgagtacccacagtactacctggtacggcggtagtac

SEQ ID NO: 5945 - RNA, 145 nt, synthetic construct
  source 1..145: mol_type = other RNA
ggctcagccaggtagtactggttttagagctagaaatagcaagttaaaataaggctagtccgttatcaacttgaaaaagtggcaccgagtcggtgcacgcagccccttcgagtacccacagtactacctggtaaggcggtagtac

SEQ ID NO: 5946 - RNA, 142 nt, synthetic construct
  source 1..142: mol_type = other RNA
ggctcagccaggtagtactggttttagagctagaaatagcaagttaaaataaggctagtccgttatcaacttgaaaaagtggcaccgagtcggtgcacgcagccccttcgagtacccacagtactacctggtctaggtagta

SEQ ID NO: 5947 - RNA, 142 nt, synthetic construct
  source 1..142: mol_type = other RNA
ggctcagccaggtagtactggttttagagctagaaatagcaagttaaaataaggctagtccgttatcaacttgaaaaagtggcaccgagtcggtgcacgcagccccttcgagtacccacagtactacctgggataggtagta

SEQ ID NO: 5948 - RNA, 145 nt, synthetic construct
  source 1..145: mol_type = other RNA
ggctcagccaggtagtactggttttagagctagaaatagcaagttaaaataaggctagtccgttatcaacttgaaaaagtggcaccgagtcggtgcacgcagccccttcgagtacccacagtactacctggacgcatcaggtagt

SEQ ID NO: 5949 - RNA, 145 nt, synthetic construct
  source 1..145: mol_type = other RNA
ggctcagccaggtagtactggttttagagctagaaatagcaagttaaaataaggctagtccgttatcaacttgaaaaagtggcaccgagtcggtgcacgcagccccttcgagtacccacagtactacctggactcatcaggtagt

SEQ ID NO: 5950 - RNA, 145 nt, synthetic construct
  source 1..145: mol_type = other RNA
ggctcagccaggtagtactggttttagagctagaaatagcaagttaaaataaggctagtccgttatcaacttgaaaaagtggcaccgagtcggtgcacgcagccccttcgagtacccacagtactacctgggttactccaggtag

SEQ ID NO: 5951 - RNA, 145 nt, synthetic construct
  source 1..145: mol_type = other RNA
ggctcagccaggtagtactggttttagagctagaaatagcaagttaaaataaggctagtccgttatcaacttgaaaaagtggcaccgagtcggtgcacgcagccccttcgagtacccacagtactacctgggagagtccaggtag

SEQ ID NO: 5952 - RNA, 129 nt, synthetic construct
  source 1..129: mol_type = other RNA
gagtactgtgggtactcgaaggttttagagctagaaatagcaagttaaaataaggctagtccgttatcaacttgaaaaagtggcaccgagtcggtgcgtgtggtacgcagccccttcgagtacccacag

SEQ ID NO: 5953 - RNA, 139 nt, synthetic construct
  source 1..139: mol_type = other RNA
gagtactgtgggtactcgaaggttttagagctagaaatagcaagttaaaataaggctagtccgttatcaacttgaaaaagtggcaccgagtcggtgcgtgtggtacgcagccccttcgagtacccacagttgcctacac

SEQ ID NO: 5954 - RNA, 139 nt, synthetic construct
  source 1..139: mol_type = other RNA
gagtactgtgggtactcgaaggttttagagctagaaatagcaagttaaaataaggctagtccgttatcaacttgaaaaagtggcaccgagtcggtgcgtgtggtacgcagccccttcgagtacccacagactcgaacac

SEQ ID NO: 5955 - RNA, 139 nt, synthetic construct
  source 1..139: mol_type = other RNA
gagtactgtgggtactcgaaggttttagagctagaaatagcaagttaaaataaggctagtccgttatcaacttgaaaaagtggcaccgagtcggtgcgtgtggtacgcagccccttcgagtacccacagcgtgatcaca

SEQ ID NO: 5956 - RNA, 138 nt, synthetic construct
  source 1..138: mol_type = other RNA
gagtactgtgggtactcgaaggttttagagctagaaatagcaagttaaaataaggctagtccgttatcaacttgaaaaagtggcaccgagtcggtgcgtgtggtacgcagccccttcgagtacccacagggcttcaca

SEQ ID NO: 5957 - RNA, 139 nt, synthetic construct
  source 1..139: mol_type = other RNA
gagtactgtgggtactcgaaggttttagagctagaaatagcaagttaaaataaggctagtccgttatcaacttgaaaaagtggcaccgagtcggtgcgtgtggtacgcagccccttcgagtacccacaggcatgcccac

SEQ ID NO: 5958 - RNA, 139 nt, synthetic construct
  source 1..139: mol_type = other RNA
gagtactgtgggtactcgaaggttttagagctagaaatagcaagttaaaataaggctagtccgttatcaacttgaaaaagtggcaccgagtcggtgcgtgtggtacgcagccccttcgagtacccacagagcgcgccac

SEQ ID NO: 5959 - RNA, 139 nt, synthetic construct
  source 1..139: mol_type = other RNA
gagtactgtgggtactcgaaggttttagagctagaaatagcaagttaaaataaggctagtccgttatcaacttgaaaaagtggcaccgagtcggtgcgtgtggtacgcagccccttcgagtacccacagtgtatcacca

SEQ ID NO: 5960 - RNA, 139 nt, synthetic construct
  source 1..139: mol_type = other RNA
gagtactgtgggtactcgaaggttttagagctagaaatagcaagttaaaataaggctagtccgttatcaacttgaaaaagtggcaccgagtcggtgcgtgtggtacgcagccccttcgagtacccacagactggtacca

SEQ ID NO: 5961 - RNA, 139 nt, synthetic construct
  source 1..139: mol_type = other RNA
gagtactgtgggtactcgaaggttttagagctagaaatagcaagttaaaataaggctagtccgttatcaacttgaaaaagtggcaccgagtcggtgcgtgtggtacgcagccccttcgagtacccacagaccgcgtacc

SEQ ID NO: 5962 - RNA, 139 nt, synthetic construct
  source 1..139: mol_type = other RNA
gagtactgtgggtactcgaaggttttagagctagaaatagcaagttaaaataaggctagtccgttatcaacttgaaaaagtggcaccgagtcggtgcgtgtggtacgcagccccttcgagtacccacagtcagcgtacc

SEQ ID NO: 5963 - RNA, 138 nt, synthetic construct
  source 1..138: mol_type = other RNA
gagtactgtgggtactcgaaggttttagagctagaaatagcaagttaaaataaggctagtccgttatcaacttgaaaaagtggcaccgagtcggtgcgtgtggtacgcagccccttcgagtacccacaggcgtcgtac

SEQ ID NO: 5964 - RNA, 138 nt, synthetic construct
  source 1..138: mol_type = other RNA
gagtactgtgggtactcgaaggttttagagctagaaatagcaagttaaaataaggctagtccgttatcaacttgaaaaagtggcaccgagtcggtgcgtgtggtacgcagccccttcgagtacccacaggctctgtac

SEQ ID NO: 5965 - RNA, 139 nt, synthetic construct
  source 1..139: mol_type = other RNA
gagtactgtgggtactcgaaggttttagagctagaaatagcaagttaaaataaggctagtccgttatcaacttgaaaaagtggcaccgagtcggtgcgtgtggtacgcagccccttcgagtacccacaggtagcgcgta

SEQ ID NO: 5966 - RNA, 139 nt, synthetic construct
  source 1..139: mol_type = other RNA
gagtactgtgggtactcgaaggttttagagctagaaatagcaagttaaaataaggctagtccgttatcaacttgaaaaagtggcaccgagtcggtgcgtgtggtacgcagccccttcgagtacccacagtgtctgcgta

SEQ ID NO: 5967 - RNA, 139 nt, synthetic construct
  source 1..139: mol_type = other RNA
gagtactgtgggtactcgaaggttttagagctagaaatagcaagttaaaataaggctagtccgttatcaacttgaaaaagtggcaccgagtcggtgcgtgtggtacgcagccccttcgagtacccacagttggttgcgt

SEQ ID NO: 5968 - RNA, 139 nt, synthetic construct
  source 1..139: mol_type = other RNA
gagtactgtgggtactcgaaggttttagagctagaaatagcaagttaaaataaggctagtccgttatcaacttgaaaaagtggcaccgagtcggtgcgtgtggtacgcagccccttcgagtacccacagggaattgcgt

SEQ ID NO: 5969 - RNA, 139 nt, synthetic construct
  source 1..139: mol_type = other RNA
gagtactgtgggtactcgaaggttttagagctagaaatagcaagttaaaataaggctagtccgttatcaacttgaaaaagtggcaccgagtcggtgcgtgtggtacgcagccccttcgagtacccacagggtaattgcg

SEQ ID NO: 5970 - RNA, 138 nt, synthetic construct
  source 1..138: mol_type = other RNA
gagtactgtgggtactcgaaggttttagagctagaaatagcaagttaaaataaggctagtccgttatcaacttgaaaaagtggcaccgagtcggtgcgtgtggtacgcagccccttcgagtacccacagttggttgcg

SEQ ID NO: 5971 - RNA, 139 nt, synthetic construct
  source 1..139: mol_type = other RNA
gagtactgtgggtactcgaaggttttagagctagaaatagcaagttaaaataaggctagtccgttatcaacttgaaaaagtggcaccgagtcggtgcgtgtggtacgcagccccttcgagtacccacagatcgagctgc

SEQ ID NO: 5972 - RNA, 139 nt, synthetic construct
  source 1..139: mol_type = other RNA
gagtactgtgggtactcgaaggttttagagctagaaatagcaagttaaaataaggctagtccgttatcaacttgaaaaagtggcaccgagtcggtgcgtgtggtacgcagccccttcgagtacccacagttgaagctgc

SEQ ID NO: 5973 - RNA, 138 nt, synthetic construct
  source 1..138: mol_type = other RNA
gagtactgtgggtactcgaaggttttagagctagaaatagcaagttaaaataaggctagtccgttatcaacttgaaaaagtggcaccgagtcggtgcgtgtggtacgcagccccttcgagtacccacagtcgtggctg

SEQ ID NO: 5974 - RNA, 138 nt, synthetic construct
  source 1..138: mol_type = other RNA
gagtactgtgggtactcgaaggttttagagctagaaatagcaagttaaaataaggctagtccgttatcaacttgaaaaagtggcaccgagtcggtgcgtgtggtacgcagccccttcgagtacccacagtcgcggctg

SEQ ID NO: 5975 - RNA, 138 nt, synthetic construct
  source 1..138: mol_type = other RNA
gagtactgtgggtactcgaaggttttagagctagaaatagcaagttaaaataaggctagtccgttatcaacttgaaaaagtggcaccgagtcggtgcgtgtggtacgcagccccttcgagtacccacagttgtgggct

SEQ ID NO: 5976 - RNA, 138 nt, synthetic construct
  source 1..138: mol_type = other RNA
gagtactgtgggtactcgaaggttttagagctagaaatagcaagttaaaataaggctagtccgttatcaacttgaaaaagtggcaccgagtcggtgcgtgtggtacgcagccccttcgagtacccacagttgcgggct

SEQ ID NO: 5977 - RNA, 139 nt, synthetic construct
  source 1..139: mol_type = other RNA
gagtactgtgggtactcgaaggttttagagctagaaatagcaagttaaaataaggctagtccgttatcaacttgaaaaagtggcaccgagtcggtgcgtgtggtacgcagccccttcgagtacccacagagacttgggc

SEQ ID NO: 5978 - RNA, 139 nt, synthetic construct
  source 1..139: mol_type = other RNA
gagtactgtgggtactcgaaggttttagagctagaaatagcaagttaaaataaggctagtccgttatcaacttgaaaaagtggcaccgagtcggtgcgtgtggtacgcagccccttcgagtacccacagtgtcaagggc

SEQ ID NO: 5979 - RNA, 139 nt, synthetic construct
  source 1..139: mol_type = other RNA
gagtactgtgggtactcgaaggttttagagctagaaatagcaagttaaaataaggctagtccgttatcaacttgaaaaagtggcaccgagtcggtgcgtgtggtacgcagccccttcgagtacccacagttaacagggg

SEQ ID NO: 5980 - RNA, 139 nt, synthetic construct
  source 1..139: mol_type = other RNA
gagtactgtgggtactcgaaggttttagagctagaaatagcaagttaaaataaggctagtccgttatcaacttgaaaaagtggcaccgagtcggtgcgtgtggtacgcagccccttcgagtacccacagttaacggggg

SEQ ID NO: 5981 - RNA, 139 nt, synthetic construct
  source 1..139: mol_type = other RNA
gagtactgtgggtactcgaaggttttagagctagaaatagcaagttaaaataaggctagtccgttatcaacttgaaaaagtggcaccgagtcggtgcgtgtggtacgcagccccttcgagtacccacagtcttaaaggg

SEQ ID NO: 5982 - RNA, 139 nt, synthetic construct
  source 1..139: mol_type = other RNA
gagtactgtgggtactcgaaggttttagagctagaaatagcaagttaaaataaggctagtccgttatcaacttgaaaaagtggcaccgagtcggtgcgtgtggtacgcagccccttcgagtacccacaggtgactaggg

SEQ ID NO: 5983 - RNA, 137 nt, synthetic construct
  source 1..137: mol_type = other RNA
gagtactgtgggtactcgaaggttttagagctagaaatagcaagttaaaataaggctagtccgttatcaacttgaaaaagtggcaccgagtcggtgcgtgtggtacgcagccccttcgagtacccacaggtagaagg

SEQ ID NO: 5984 - RNA, 139 nt, synthetic construct
  source 1..139: mol_type = other RNA
gagtactgtgggtactcgaaggttttagagctagaaatagcaagttaaaataaggctagtccgttatcaacttgaaaaagtggcaccgagtcggtgcgtgtggtacgcagccccttcgagtacccacaggttatcaagg

SEQ ID NO: 5985 - RNA, 139 nt, synthetic construct
  source 1..139: mol_type = other RNA
gagtactgtgggtactcgaaggttttagagctagaaatagcaagttaaaataaggctagtccgttatcaacttgaaaaagtggcaccgagtcggtgcgtgtggtacgcagccccttcgagtacccacaggcaatcgaag

SEQ ID NO: 5986 - RNA, 139 nt, synthetic construct
  source 1..139: mol_type = other RNA
gagtactgtgggtactcgaaggttttagagctagaaatagcaagttaaaataaggctagtccgttatcaacttgaaaaagtggcaccgagtcggtgcgtgtggtacgcagccccttcgagtacccacagtcattcgaag

SEQ ID NO: 5987 - RNA, 138 nt, synthetic construct
  source 1..138: mol_type = other RNA
gagtactgtgggtactcgaaggttttagagctagaaatagcaagttaaaataaggctagtccgttatcaacttgaaaaagtggcaccgagtcggtgcgtgtggtacgcagccccttcgagtacccacaggccctcgaa

SEQ ID NO: 5988 - RNA, 139 nt, synthetic construct
  source 1..139: mol_type = other RNA
gagtactgtgggtactcgaaggttttagagctagaaatagcaagttaaaataaggctagtccgttatcaacttgaaaaagtggcaccgagtcggtgcgtgtggtacgcagccccttcgagtacccacagcggtgtcgaa

SEQ ID NO: 5989 - RNA, 139 nt, synthetic construct
  source 1..139: mol_type = other RNA
gagtactgtgggtactcgaaggttttagagctagaaatagcaagttaaaataaggctagtccgttatcaacttgaaaaagtggcaccgagtcggtgcgtgtggtacgcagccccttcgagtacccacaggtgttctcga

SEQ ID NO: 5990 - RNA, 139 nt, synthetic construct
  source 1..139: mol_type = other RNA
gagtactgtgggtactcgaaggttttagagctagaaatagcaagttaaaataaggctagtccgttatcaacttgaaaaagtggcaccgagtcggtgcgtgtggtacgcagccccttcgagtacccacaggtgatctcga

SEQ ID NO: 5991 - RNA, 137 nt, synthetic construct
  source 1..137: mol_type = other RNA
gagtactgtgggtactcgaaggttttagagctagaaatagcaagttaaaataaggctagtccgttatcaacttgaaaaagtggcaccgagtcggtgcgtgtggtacgcagccccttcgagtacccacagtgtactcg

SEQ ID NO: 5992 - RNA, 137 nt, synthetic construct
  source 1..137: mol_type = other RNA
gagtactgtgggtactcgaaggttttagagctagaaatagcaagttaaaataaggctagtccgttatcaacttgaaaaagtggcaccgagtcggtgcgtgtggtacgcagccccttcgagtacccacaggttgctcg

SEQ ID NO: 5993 - RNA, 139 nt, synthetic construct
  source 1..139: mol_type = other RNA
gagtactgtgggtactcgaaggttttagagctagaaatagcaagttaaaataaggctagtccgttatcaacttgaaaaagtggcaccgagtcggtgcgtgtggtacgcagccccttcgagtacccacagctggctactc

SEQ ID NO: 5994 - RNA, 139 nt, synthetic construct
  source 1..139: mol_type = other RNA
gagtactgtgggtactcgaaggttttagagctagaaatagcaagttaaaataaggctagtccgttatcaacttgaaaaagtggcaccgagtcggtgcgtgtggtacgcagccccttcgagtacccacagctggatactc

SEQ ID NO: 5995 - RNA, 138 nt, synthetic construct
  source 1..138: mol_type = other RNA
gagtactgtgggtactcgaaggttttagagctagaaatagcaagttaaaataaggctagtccgttatcaacttgaaaaagtggcaccgagtcggtgcgtgtggtacgcagccccttcgagtacccacagtggagtact

SEQ ID NO: 5996 - RNA, 138 nt, synthetic construct
  source 1..138: mol_type = other RNA
gagtactgtgggtactcgaaggttttagagctagaaatagcaagttaaaataaggctagtccgttatcaacttgaaaaagtggcaccgagtcggtgcgtgtggtacgcagccccttcgagtacccacagtgcggtact

SEQ ID NO: 5997 - RNA, 135 nt, synthetic construct
  source 1..135: mol_type = other RNA
gagtactgtgggtactcgaaggttttagagctagaaatagcaagttaaaataaggctagtccgttatcaacttgaaaaagtggcaccgagtcggtgcgtgtggtacgcagccccttcgagtacccacagcggtac

SEQ ID NO: 5998 - RNA, 137 nt, synthetic construct
  source 1..137: mol_type = other RNA
gagtactgtgggtactcgaaggttttagagctagaaatagcaagttaaaataaggctagtccgttatcaacttgaaaaagtggcaccgagtcggtgcgtgtggtacgcagccccttcgagtacccacagtgtggtac

SEQ ID NO: 5999 - RNA, 139 nt, synthetic construct
  source 1..139: mol_type = other RNA
gagtactgtgggtactcgaaggttttagagctagaaatagcaagttaaaataaggctagtccgttatcaacttgaaaaagtggcaccgagtcggtgcgtgtggtacgcagccccttcgagtacccacaggtatgtggta

SEQ ID NO: 6000 - RNA, 139 nt, synthetic construct
  source 1..139: mol_type = other RNA
gagtactgtgggtactcgaaggttttagagctagaaatagcaagttaaaataaggctagtccgttatcaacttgaaaaagtggcaccgagtcggtgcgtgtggtacgcagccccttcgagtacccacagtgatgtggta

SEQ ID NO: 6001 - RNA, 138 nt, synthetic construct
  source 1..138: mol_type = other RNA
gagtactgtgggtactcgaaggttttagagctagaaatagcaagttaaaataaggctagtccgttatcaacttgaaaaagtggcaccgagtcggtgcgtgtggtacgcagccccttcgagtacccacagggttcgggt

SEQ ID NO: 6002 - RNA, 139 nt, synthetic construct
  source 1..139: mol_type = other RNA
gagtactgtgggtactcgaaggttttagagctagaaatagcaagttaaaataaggctagtccgttatcaacttgaaaaagtggcaccgagtcggtgcgtgtggtacgcagccccttcgagtacccacagggttaagggt

SEQ ID NO: 6003 - RNA, 139 nt, synthetic construct
  source 1..139: mol_type = other RNA
gagtactgtgggtactcgaaggttttagagctagaaatagcaagttaaaataaggctagtccgttatcaacttgaaaaagtggcaccgagtcggtgcgtgtggtacgcagccccttcgagtacccacagttgggatggg

SEQ ID NO: 6004 - RNA, 139 nt, synthetic construct
  source 1..139: mol_type = other RNA
gagtactgtgggtactcgaaggttttagagctagaaatagcaagttaaaataaggctagtccgttatcaacttgaaaaagtggcaccgagtcggtgcgtgtggtacgcagccccttcgagtacccacagggcaggtggg

SEQ ID NO: 6005 - RNA, 138 nt, synthetic construct
  source 1..138: mol_type = other RNA
gagtactgtgggtactcgaaggttttagagctagaaatagcaagttaaaataaggctagtccgttatcaacttgaaaaagtggcaccgagtcggtgcgtgtggtacgcagccccttcgagtacccacagtgtgggtgg

SEQ ID NO: 6006 - RNA, 138 nt, synthetic construct
  source 1..138: mol_type = other RNA
gagtactgtgggtactcgaaggttttagagctagaaatagcaagttaaaataaggctagtccgttatcaacttgaaaaagtggcaccgagtcggtgcgtgtggtacgcagccccttcgagtacccacagagtgggtgg

SEQ ID NO: 6007 - RNA, 139 nt, synthetic construct
  source 1..139: mol_type = other RNA
gagtactgtgggtactcgaaggttttagagctagaaatagcaagttaaaataaggctagtccgttatcaacttgaaaaagtggcaccgagtcggtgcgtgtggtacgcagccccttcgagtacccacagtgaacctgtg

SEQ ID NO: 6008 - RNA, 139 nt, synthetic construct
  source 1..139: mol_type = other RNA
gagtactgtgggtactcgaaggttttagagctagaaatagcaagttaaaataaggctagtccgttatcaacttgaaaaagtggcaccgagtcggtgcgtgtggtacgcagccccttcgagtacccacagtgtccctgtg

SEQ ID NO: 6009 - RNA, 141 nt, synthetic construct
  source 1..141: mol_type = other RNA
gagtactgtgggtactcgaaggttttagagctagaaatagcaagttaaaataaggctagtccgttatcaacttgaaaaagtggcaccgagtcggtgcgtgtggtacgcagccccttcgagtacccacagacggagccacac

SEQ ID NO: 6010 - RNA, 141 nt, synthetic construct
  source 1..141: mol_type = other RNA
gagtactgtgggtactcgaaggttttagagctagaaatagcaagttaaaataaggctagtccgttatcaacttgaaaaagtggcaccgagtcggtgcgtgtggtacgcagccccttcgagtacccacagatgtaaccacac

SEQ ID NO: 6011 - RNA, 141 nt, synthetic construct
  source 1..141: mol_type = other RNA
gagtactgtgggtactcgaaggttttagagctagaaatagcaagttaaaataaggctagtccgttatcaacttgaaaaagtggcaccgagtcggtgcgtgtggtacgcagccccttcgagtacccacagtcgactaccaca

SEQ ID NO: 6012 - RNA, 139 nt, synthetic construct
  source 1..139: mol_type = other RNA
gagtactgtgggtactcgaaggttttagagctagaaatagcaagttaaaataaggctagtccgttatcaacttgaaaaagtggcaccgagtcggtgcgtgtggtacgcagccccttcgagtacccacagagctaccaca

SEQ ID NO: 6013 - RNA, 141 nt, synthetic construct
  source 1..141: mol_type = other RNA
gagtactgtgggtactcgaaggttttagagctagaaatagcaagttaaaataaggctagtccgttatcaacttgaaaaagtggcaccgagtcggtgcgtgtggtacgcagccccttcgagtacccacagccttggtaccac

SEQ ID NO: 6014 - RNA, 141 nt, synthetic construct
  source 1..141: mol_type = other RNA
gagtactgtgggtactcgaaggttttagagctagaaatagcaagttaaaataaggctagtccgttatcaacttgaaaaagtggcaccgagtcggtgcgtgtggtacgcagccccttcgagtacccacagccctagtaccac

SEQ ID NO: 6015 - RNA, 141 nt, synthetic construct
  source 1..141: mol_type = other RNA
gagtactgtgggtactcgaaggttttagagctagaaatagcaagttaaaataaggctagtccgttatcaacttgaaaaagtggcaccgagtcggtgcgtgtggtacgcagccccttcgagtacccacagatactcgtacca

SEQ ID NO: 6016 - RNA, 141 nt, synthetic construct
  source 1..141: mol_type = other RNA
gagtactgtgggtactcgaaggttttagagctagaaatagcaagttaaaataaggctagtccgttatcaacttgaaaaagtggcaccgagtcggtgcgtgtggtacgcagccccttcgagtacccacagccgaccgtacca

SEQ ID NO: 6017 - RNA, 139 nt, synthetic construct
  source 1..139: mol_type = other RNA
gagtactgtgggtactcgaaggttttagagctagaaatagcaagttaaaataaggctagtccgttatcaacttgaaaaagtggcaccgagtcggtgcgtgtggtacgcagccccttcgagtacccacagatcgcgtacc

SEQ ID NO: 6018 - RNA, 141 nt, synthetic construct
  source 1..141: mol_type = other RNA
gagtactgtgggtactcgaaggttttagagctagaaatagcaagttaaaataaggctagtccgttatcaacttgaaaaagtggcaccgagtcggtgcgtgtggtacgcagccccttcgagtacccacagtcctggcgtacc

SEQ ID NO: 6019 - RNA, 139 nt, synthetic construct
  source 1..139: mol_type = other RNA
gagtactgtgggtactcgaaggttttagagctagaaatagcaagttaaaataaggctagtccgttatcaacttgaaaaagtggcaccgagtcggtgcgtgtggtacgcagccccttcgagtacccacagccgcgcgtac

SEQ ID NO: 6020 - RNA, 140 nt, synthetic construct
  source 1..140: mol_type = other RNA
gagtactgtgggtactcgaaggttttagagctagaaatagcaagttaaaataaggctagtccgttatcaacttgaaaaagtggcaccgagtcggtgcgtgtggtacgcagccccttcgagtacccacagtcagggcgtac

SEQ ID NO: 6021 - RNA, 141 nt, synthetic construct
  source 1..141: mol_type = other RNA
gagtactgtgggtactcgaaggttttagagctagaaatagcaagttaaaataaggctagtccgttatcaacttgaaaaagtggcaccgagtcggtgcgtgtggtacgcagccccttcgagtacccacagttaagttgcgta

SEQ ID NO: 6022 - RNA, 141 nt, synthetic construct
  source 1..141: mol_type = other RNA
gagtactgtgggtactcgaaggttttagagctagaaatagcaagttaaaataaggctagtccgttatcaacttgaaaaagtggcaccgagtcggtgcgtgtggtacgcagccccttcgagtacccacagtccagttgcgta

SEQ ID NO: 6023 - RNA, 138 nt, synthetic construct
  source 1..138: mol_type = other RNA
gagtactgtgggtactcgaaggttttagagctagaaatagcaagttaaaataaggctagtccgttatcaacttgaaaaagtggcaccgagtcggtgcgtgtggtacgcagccccttcgagtacccacagtcgctgcgt

SEQ ID NO: 6024 - RNA, 141 nt, synthetic construct
  source 1..141: mol_type = other RNA
gagtactgtgggtactcgaaggttttagagctagaaatagcaagttaaaataaggctagtccgttatcaacttgaaaaagtggcaccgagtcggtgcgtgtggtacgcagccccttcgagtacccacagtcagtgctgcgt

SEQ ID NO: 6025 - RNA, 141 nt, synthetic construct
  source 1..141: mol_type = other RNA
gagtactgtgggtactcgaaggttttagagctagaaatagcaagttaaaataaggctagtccgttatcaacttgaaaaagtggcaccgagtcggtgcgtgtggtacgcagccccttcgagtacccacagtccctcgctgcg

SEQ ID NO: 6026 - RNA, 140 nt, synthetic construct
  source 1..140: mol_type = other RNA
gagtactgtgggtactcgaaggttttagagctagaaatagcaagttaaaataaggctagtccgttatcaacttgaaaaagtggcaccgagtcggtgcgtgtggtacgcagccccttcgagtacccacagtgtatgctgcg

SEQ ID NO: 6027 - RNA, 140 nt, synthetic construct
  source 1..140: mol_type = other RNA
gagtactgtgggtactcgaaggttttagagctagaaatagcaagttaaaataaggctagtccgttatcaacttgaaaaagtggcaccgagtcggtgcgtgtggtacgcagccccttcgagtacccacagtgtatggctgc

SEQ ID NO: 6028 - RNA, 140 nt, synthetic construct
  source 1..140: mol_type = other RNA
gagtactgtgggtactcgaaggttttagagctagaaatagcaagttaaaataaggctagtccgttatcaacttgaaaaagtggcaccgagtcggtgcgtgtggtacgcagccccttcgagtacccacagtgtgaggctgc

SEQ ID NO: 6029 - RNA, 141 nt, synthetic construct
  source 1..141: mol_type = other RNA
gagtactgtgggtactcgaaggttttagagctagaaatagcaagttaaaataaggctagtccgttatcaacttgaaaaagtggcaccgagtcggtgcgtgtggtacgcagccccttcgagtacccacagacacaagggctg

SEQ ID NO: 6030 - RNA, 141 nt, synthetic construct
  source 1..141: mol_type = other RNA
gagtactgtgggtactcgaaggttttagagctagaaatagcaagttaaaataaggctagtccgttatcaacttgaaaaagtggcaccgagtcggtgcgtgtggtacgcagccccttcgagtacccacagttagttgggctg

SEQ ID NO: 6031 - RNA, 140 nt, synthetic construct
  source 1..140: mol_type = other RNA
gagtactgtgggtactcgaaggttttagagctagaaatagcaagttaaaataaggctagtccgttatcaacttgaaaaagtggcaccgagtcggtgcgtgtggtacgcagccccttcgagtacccacagataccggggct

SEQ ID NO: 6032 - RNA, 140 nt, synthetic construct
  source 1..140: mol_type = other RNA
gagtactgtgggtactcgaaggttttagagctagaaatagcaagttaaaataaggctagtccgttatcaacttgaaaaagtggcaccgagtcggtgcgtgtggtacgcagccccttcgagtacccacagatgccggggct

SEQ ID NO: 6033 - RNA, 138 nt, synthetic construct
  source 1..138: mol_type = other RNA
gagtactgtgggtactcgaaggttttagagctagaaatagcaagttaaaataaggctagtccgttatcaacttgaaaaagtggcaccgagtcggtgcgtgtggtacgcagccccttcgagtacccacagttcaggggc

SEQ ID NO: 6034 - RNA, 141 nt, synthetic construct
  source 1..141: mol_type = other RNA
gagtactgtgggtactcgaaggttttagagctagaaatagcaagttaaaataaggctagtccgttatcaacttgaaaaagtggcaccgagtcggtgcgtgtggtacgcagccccttcgagtacccacagataatcaggggc

SEQ ID NO: 6035 - RNA, 141 nt, synthetic construct
  source 1..141: mol_type = other RNA
gagtactgtgggtactcgaaggttttagagctagaaatagcaagttaaaataaggctagtccgttatcaacttgaaaaagtggcaccgagtcggtgcgtgtggtacgcagccccttcgagtacccacagagatataagggg

SEQ ID NO: 6036 - RNA, 139 nt, synthetic construct
  source 1..139: mol_type = other RNA
gagtactgtgggtactcgaaggttttagagctagaaatagcaagttaaaataaggctagtccgttatcaacttgaaaaagtggcaccgagtcggtgcgtgtggtacgcagccccttcgagtacccacagatataagggg

SEQ ID NO: 6037 - RNA, 139 nt, synthetic construct
  source 1..139: mol_type = other RNA
gagtactgtgggtactcgaaggttttagagctagaaatagcaagttaaaataaggctagtccgttatcaacttgaaaaagtggcaccgagtcggtgcgtgtggtacgcagccccttcgagtacccacagttgtgaaggg

SEQ ID NO: 6038 - RNA, 139 nt, synthetic construct
  source 1..139: mol_type = other RNA
gagtactgtgggtactcgaaggttttagagctagaaatagcaagttaaaataaggctagtccgttatcaacttgaaaaagtggcaccgagtcggtgcgtgtggtacgcagccccttcgagtacccacagttatgaaggg

SEQ ID NO: 6039 - RNA, 141 nt, synthetic construct
  source 1..141: mol_type = other RNA
gagtactgtgggtactcgaaggttttagagctagaaatagcaagttaaaataaggctagtccgttatcaacttgaaaaagtggcaccgagtcggtgcgtgtggtacgcagccccttcgagtacccacagatatggcgaagg

SEQ ID NO: 6040 - RNA, 141 nt, synthetic construct
  source 1..141: mol_type = other RNA
gagtactgtgggtactcgaaggttttagagctagaaatagcaagttaaaataaggctagtccgttatcaacttgaaaaagtggcaccgagtcggtgcgtgtggtacgcagccccttcgagtacccacagtcatggcgaagg

SEQ ID NO: 6041 - RNA, 141 nt, synthetic construct
  source 1..141: mol_type = other RNA
gagtactgtgggtactcgaaggttttagagctagaaatagcaagttaaaataaggctagtccgttatcaacttgaaaaagtggcaccgagtcggtgcgtgtggtacgcagccccttcgagtacccacagccctattcgaag

SEQ ID NO: 6042 - RNA, 140 nt, synthetic construct
  source 1..140: mol_type = other RNA
gagtactgtgggtactcgaaggttttagagctagaaatagcaagttaaaataaggctagtccgttatcaacttgaaaaagtggcaccgagtcggtgcgtgtggtacgcagccccttcgagtacccacagtgttactcgaa

SEQ ID NO: 6043 - RNA, 141 nt, synthetic construct
  source 1..141: mol_type = other RNA
gagtactgtgggtactcgaaggttttagagctagaaatagcaagttaaaataaggctagtccgttatcaacttgaaaaagtggcaccgagtcggtgcgtgtggtacgcagccccttcgagtacccacagcgcatactcgaa

SEQ ID NO: 6044 - RNA, 141 nt, synthetic construct
  source 1..141: mol_type = other RNA
gagtactgtgggtactcgaaggttttagagctagaaatagcaagttaaaataaggctagtccgttatcaacttgaaaaagtggcaccgagtcggtgcgtgtggtacgcagccccttcgagtacccacagctagtgactcga

SEQ ID NO: 6045 - RNA, 141 nt, synthetic construct
  source 1..141: mol_type = other RNA
gagtactgtgggtactcgaaggttttagagctagaaatagcaagttaaaataaggctagtccgttatcaacttgaaaaagtggcaccgagtcggtgcgtgtggtacgcagccccttcgagtacccacagctgtatactcga

SEQ ID NO: 6046 - RNA, 141 nt, synthetic construct
  source 1..141: mol_type = other RNA
gagtactgtgggtactcgaaggttttagagctagaaatagcaagttaaaataaggctagtccgttatcaacttgaaaaagtggcaccgagtcggtgcgtgtggtacgcagccccttcgagtacccacagtgtaagtactcg

SEQ ID NO: 6047 - RNA, 141 nt, synthetic construct
  source 1..141: mol_type = other RNA
gagtactgtgggtactcgaaggttttagagctagaaatagcaagttaaaataaggctagtccgttatcaacttgaaaaagtggcaccgagtcggtgcgtgtggtacgcagccccttcgagtacccacagtgtcagtactcg

SEQ ID NO: 6048 - RNA, 141 nt, synthetic construct
  source 1..141: mol_type = other RNA
gagtactgtgggtactcgaaggttttagagctagaaatagcaagttaaaataaggctagtccgttatcaacttgaaaaagtggcaccgagtcggtgcgtgtggtacgcagccccttcgagtacccacagttatgtgtactc

SEQ ID NO: 6049 - RNA, 141 nt, synthetic construct
  source 1..141: mol_type = other RNA
gagtactgtgggtactcgaaggttttagagctagaaatagcaagttaaaataaggctagtccgttatcaacttgaaaaagtggcaccgagtcggtgcgtgtggtacgcagccccttcgagtacccacagatatgtgtactc

SEQ ID NO: 6050 - RNA, 140 nt, synthetic construct
  source 1..140: mol_type = other RNA
gagtactgtgggtactcgaaggttttagagctagaaatagcaagttaaaataaggctagtccgttatcaacttgaaaaagtggcaccgagtcggtgcgtgtggtacgcagccccttcgagtacccacagttggtggtact

SEQ ID NO: 6051 - RNA, 140 nt, synthetic construct
  source 1..140: mol_type = other RNA
gagtactgtgggtactcgaaggttttagagctagaaatagcaagttaaaataaggctagtccgttatcaacttgaaaaagtggcaccgagtcggtgcgtgtggtacgcagccccttcgagtacccacagacggtggtact

SEQ ID NO: 6052 - RNA, 141 nt, synthetic construct
  source 1..141: mol_type = other RNA
gagtactgtgggtactcgaaggttttagagctagaaatagcaagttaaaataaggctagtccgttatcaacttgaaaaagtggcaccgagtcggtgcgtgtggtacgcagccccttcgagtacccacagatgacggggtac

SEQ ID NO: 6053 - RNA, 141 nt, synthetic construct
  source 1..141: mol_type = other RNA
gagtactgtgggtactcgaaggttttagagctagaaatagcaagttaaaataaggctagtccgttatcaacttgaaaaagtggcaccgagtcggtgcgtgtggtacgcagccccttcgagtacccacagacaaaggggtac

SEQ ID NO: 6054 - RNA, 141 nt, synthetic construct
  source 1..141: mol_type = other RNA
gagtactgtgggtactcgaaggttttagagctagaaatagcaagttaaaataaggctagtccgttatcaacttgaaaaagtggcaccgagtcggtgcgtgtggtacgcagccccttcgagtacccacagcgttcttgggta

SEQ ID NO: 6055 - RNA, 141 nt, synthetic construct
  source 1..141: mol_type = other RNA
gagtactgtgggtactcgaaggttttagagctagaaatagcaagttaaaataaggctagtccgttatcaacttgaaaaagtggcaccgagtcggtgcgtgtggtacgcagccccttcgagtacccacagcgatcttgggta

SEQ ID NO: 6056 - RNA, 138 nt, synthetic construct
  source 1..138: mol_type = other RNA
gagtactgtgggtactcgaaggttttagagctagaaatagcaagttaaaataaggctagtccgttatcaacttgaaaaagtggcaccgagtcggtgcgtgtggtacgcagccccttcgagtacccacagattgtgggt

SEQ ID NO: 6057 - RNA, 138 nt, synthetic construct
  source 1..138: mol_type = other RNA
gagtactgtgggtactcgaaggttttagagctagaaatagcaagttaaaataaggctagtccgttatcaacttgaaaaagtggcaccgagtcggtgcgtgtggtacgcagccccttcgagtacccacagggtgtgggt

SEQ ID NO: 6058 - RNA, 141 nt, synthetic construct
  source 1..141: mol_type = other RNA
gagtactgtgggtactcgaaggttttagagctagaaatagcaagttaaaataaggctagtccgttatcaacttgaaaaagtggcaccgagtcggtgcgtgtggtacgcagccccttcgagtacccacagacggattgtggg

SEQ ID NO: 6059 - RNA, 141 nt, synthetic construct
  source 1..141: mol_type = other RNA
gagtactgtgggtactcgaaggttttagagctagaaatagcaagttaaaataaggctagtccgttatcaacttgaaaaagtggcaccgagtcggtgcgtgtggtacgcagccccttcgagtacccacagagcaattgtggg

SEQ ID NO: 6060 - RNA, 143 nt, synthetic construct
  source 1..143: mol_type = other RNA
gagtactgtgggtactcgaaggttttagagctagaaatagcaagttaaaataaggctagtccgttatcaacttgaaaaagtggcaccgagtcggtgcgtgtggtacgcagccccttcgagtacccacagtctagataccacac

SEQ ID NO: 6061 - RNA, 143 nt, synthetic construct
  source 1..143: mol_type = other RNA
gagtactgtgggtactcgaaggttttagagctagaaatagcaagttaaaataaggctagtccgttatcaacttgaaaaagtggcaccgagtcggtgcgtgtggtacgcagccccttcgagtacccacagaccagataccacac

SEQ ID NO: 6062 - RNA, 143 nt, synthetic construct
  source 1..143: mol_type = other RNA
gagtactgtgggtactcgaaggttttagagctagaaatagcaagttaaaataaggctagtccgttatcaacttgaaaaagtggcaccgagtcggtgcgtgtggtacgcagccccttcgagtacccacagacatatgtaccaca

SEQ ID NO: 6063 - RNA, 143 nt, synthetic construct
  source 1..143: mol_type = other RNA
gagtactgtgggtactcgaaggttttagagctagaaatagcaagttaaaataaggctagtccgttatcaacttgaaaaagtggcaccgagtcggtgcgtgtggtacgcagccccttcgagtacccacagtcccatgtaccaca

SEQ ID NO: 6064 - RNA, 143 nt, synthetic construct
  source 1..143: mol_type = other RNA
gagtactgtgggtactcgaaggttttagagctagaaatagcaagttaaaataaggctagtccgttatcaacttgaaaaagtggcaccgagtcggtgcgtgtggtacgcagccccttcgagtacccacagacattccgtaccac

SEQ ID NO: 6065 - RNA, 142 nt, synthetic construct
  source 1..142: mol_type = other RNA
gagtactgtgggtactcgaaggttttagagctagaaatagcaagttaaaataaggctagtccgttatcaacttgaaaaagtggcaccgagtcggtgcgtgtggtacgcagccccttcgagtacccacagagaatcgtaccac

SEQ ID NO: 6066 - RNA, 143 nt, synthetic construct
  source 1..143: mol_type = other RNA
gagtactgtgggtactcgaaggttttagagctagaaatagcaagttaaaataaggctagtccgttatcaacttgaaaaagtggcaccgagtcggtgcgtgtggtacgcagccccttcgagtacccacagttaaaggcgtacca

SEQ ID NO: 6067 - RNA, 143 nt, synthetic construct
  source 1..143: mol_type = other RNA
gagtactgtgggtactcgaaggttttagagctagaaatagcaagttaaaataaggctagtccgttatcaacttgaaaaagtggcaccgagtcggtgcgtgtggtacgcagccccttcgagtacccacagttcaaggcgtacca

SEQ ID NO: 6068 - RNA, 143 nt, synthetic construct
  source 1..143: mol_type = other RNA
gagtactgtgggtactcgaaggttttagagctagaaatagcaagttaaaataaggctagtccgttatcaacttgaaaaagtggcaccgagtcggtgcgtgtggtacgcagccccttcgagtacccacagtgttattgcgtacc

SEQ ID NO: 6069 - RNA, 143 nt, synthetic construct
  source 1..143: mol_type = other RNA
gagtactgtgggtactcgaaggttttagagctagaaatagcaagttaaaataaggctagtccgttatcaacttgaaaaagtggcaccgagtcggtgcgtgtggtacgcagccccttcgagtacccacagttaaattgcgtacc

SEQ ID NO: 6070 - RNA, 143 nt, synthetic construct
  source 1..143: mol_type = other RNA
gagtactgtgggtactcgaaggttttagagctagaaatagcaagttaaaataaggctagtccgttatcaacttgaaaaagtggcaccgagtcggtgcgtgtggtacgcagccccttcgagtacccacagccctgtctgcgtac

SEQ ID NO: 6071 - RNA, 141 nt, synthetic construct
  source 1..141: mol_type = other RNA
gagtactgtgggtactcgaaggttttagagctagaaatagcaagttaaaataaggctagtccgttatcaacttgaaaaagtggcaccgagtcggtgcgtgtggtacgcagccccttcgagtacccacagttacctgcgtac

SEQ ID NO: 6072 - RNA, 143 nt, synthetic construct
  source 1..143: mol_type = other RNA
gagtactgtgggtactcgaaggttttagagctagaaatagcaagttaaaataaggctagtccgttatcaacttgaaaaagtggcaccgagtcggtgcgtgtggtacgcagccccttcgagtacccacagtgtgtcgctgcgta

SEQ ID NO: 6073 - RNA, 143 nt, synthetic construct
  source 1..143: mol_type = other RNA
gagtactgtgggtactcgaaggttttagagctagaaatagcaagttaaaataaggctagtccgttatcaacttgaaaaagtggcaccgagtcggtgcgtgtggtacgcagccccttcgagtacccacagtgtatcgctgcgta

SEQ ID NO: 6074 - RNA, 143 nt, synthetic construct
  source 1..143: mol_type = other RNA
gagtactgtgggtactcgaaggttttagagctagaaatagcaagttaaaataaggctagtccgttatcaacttgaaaaagtggcaccgagtcggtgcgtgtggtacgcagccccttcgagtacccacagttacccggctgcgt

SEQ ID NO: 6075 - RNA, 143 nt, synthetic construct
  source 1..143: mol_type = other RNA
gagtactgtgggtactcgaaggttttagagctagaaatagcaagttaaaataaggctagtccgttatcaacttgaaaaagtggcaccgagtcggtgcgtgtggtacgcagccccttcgagtacccacagttacgtggctgcgt

SEQ ID NO: 6076 - RNA, 143 nt, synthetic construct
  source 1..143: mol_type = other RNA
gagtactgtgggtactcgaaggttttagagctagaaatagcaagttaaaataaggctagtccgttatcaacttgaaaaagtggcaccgagtcggtgcgtgtggtacgcagccccttcgagtacccacagacaactgggctgcg

SEQ ID NO: 6077 - RNA, 143 nt, synthetic construct
  source 1..143: mol_type = other RNA
gagtactgtgggtactcgaaggttttagagctagaaatagcaagttaaaataaggctagtccgttatcaacttgaaaaagtggcaccgagtcggtgcgtgtggtacgcagccccttcgagtacccacagacacaagggctgcg

SEQ ID NO: 6078 - RNA, 142 nt, synthetic construct
  source 1..142: mol_type = other RNA
gagtactgtgggtactcgaaggttttagagctagaaatagcaagttaaaataaggctagtccgttatcaacttgaaaaagtggcaccgagtcggtgcgtgtggtacgcagccccttcgagtacccacagataccggggctgc

SEQ ID NO: 6079 - RNA, 142 nt, synthetic construct
  source 1..142: mol_type = other RNA
gagtactgtgggtactcgaaggttttagagctagaaatagcaagttaaaataaggctagtccgttatcaacttgaaaaagtggcaccgagtcggtgcgtgtggtacgcagccccttcgagtacccacagatgccggggctgc

SEQ ID NO: 6080 - RNA, 140 nt, synthetic construct
  source 1..140: mol_type = other RNA
gagtactgtgggtactcgaaggttttagagctagaaatagcaagttaaaataaggctagtccgttatcaacttgaaaaagtggcaccgagtcggtgcgtgtggtacgcagccccttcgagtacccacagttcaggggctg

SEQ ID NO: 6081 - RNA, 143 nt, synthetic construct
  source 1..143: mol_type = other RNA
gagtactgtgggtactcgaaggttttagagctagaaatagcaagttaaaataaggctagtccgttatcaacttgaaaaagtggcaccgagtcggtgcgtgtggtacgcagccccttcgagtacccacagccaatcaggggctg

SEQ ID NO: 6082 - RNA, 143 nt, synthetic construct
  source 1..143: mol_type = other RNA
gagtactgtgggtactcgaaggttttagagctagaaatagcaagttaaaataaggctagtccgttatcaacttgaaaaagtggcaccgagtcggtgcgtgtggtacgcagccccttcgagtacccacagagatataaggggct

SEQ ID NO: 6083 - RNA, 141 nt, synthetic construct
  source 1..141: mol_type = other RNA
gagtactgtgggtactcgaaggttttagagctagaaatagcaagttaaaataaggctagtccgttatcaacttgaaaaagtggcaccgagtcggtgcgtgtggtacgcagccccttcgagtacccacagatataaggggct

SEQ ID NO: 6084 - RNA, 143 nt, synthetic construct
  source 1..143: mol_type = other RNA
gagtactgtgggtactcgaaggttttagagctagaaatagcaagttaaaataaggctagtccgttatcaacttgaaaaagtggcaccgagtcggtgcgtgtggtacgcagccccttcgagtacccacagattgatgaaggggc

SEQ ID NO: 6085 - RNA, 143 nt, synthetic construct
  source 1..143: mol_type = other RNA
gagtactgtgggtactcgaaggttttagagctagaaatagcaagttaaaataaggctagtccgttatcaacttgaaaaagtggcaccgagtcggtgcgtgtggtacgcagccccttcgagtacccacagattaatgaaggggc

SEQ ID NO: 6086 - RNA, 143 nt, synthetic construct
  source 1..143: mol_type = other RNA
gagtactgtgggtactcgaaggttttagagctagaaatagcaagttaaaataaggctagtccgttatcaacttgaaaaagtggcaccgagtcggtgcgtgtggtacgcagccccttcgagtacccacagtctgtccgaagggg

SEQ ID NO: 6087 - RNA, 143 nt, synthetic construct
  source 1..143: mol_type = other RNA
gagtactgtgggtactcgaaggttttagagctagaaatagcaagttaaaataaggctagtccgttatcaacttgaaaaagtggcaccgagtcggtgcgtgtggtacgcagccccttcgagtacccacagattgtccgaagggg

SEQ ID NO: 6088 - RNA, 143 nt, synthetic construct
  source 1..143: mol_type = other RNA
gagtactgtgggtactcgaaggttttagagctagaaatagcaagttaaaataaggctagtccgttatcaacttgaaaaagtggcaccgagtcggtgcgtgtggtacgcagccccttcgagtacccacagcttcgttcgaaggg

SEQ ID NO: 6089 - RNA, 143 nt, synthetic construct
  source 1..143: mol_type = other RNA
gagtactgtgggtactcgaaggttttagagctagaaatagcaagttaaaataaggctagtccgttatcaacttgaaaaagtggcaccgagtcggtgcgtgtggtacgcagccccttcgagtacccacagcgacgttcgaaggg

SEQ ID NO: 6090 - RNA, 143 nt, synthetic construct
  source 1..143: mol_type = other RNA
gagtactgtgggtactcgaaggttttagagctagaaatagcaagttaaaataaggctagtccgttatcaacttgaaaaagtggcaccgagtcggtgcgtgtggtacgcagccccttcgagtacccacagagctgtctcgaagg

SEQ ID NO: 6091 - RNA, 143 nt, synthetic construct
  source 1..143: mol_type = other RNA
gagtactgtgggtactcgaaggttttagagctagaaatagcaagttaaaataaggctagtccgttatcaacttgaaaaagtggcaccgagtcggtgcgtgtggtacgcagccccttcgagtacccacagagttgtctcgaagg

SEQ ID NO: 6092 - RNA, 140 nt, synthetic construct
  source 1..140: mol_type = other RNA
gagtactgtgggtactcgaaggttttagagctagaaatagcaagttaaaataaggctagtccgttatcaacttgaaaaagtggcaccgagtcggtgcgtgtggtacgcagccccttcgagtacccacagtcgactcgaag

SEQ ID NO: 6093 - RNA, 142 nt, synthetic construct
  source 1..142: mol_type = other RNA
gagtactgtgggtactcgaaggttttagagctagaaatagcaagttaaaataaggctagtccgttatcaacttgaaaaagtggcaccgagtcggtgcgtgtggtacgcagccccttcgagtacccacagccgcgactcgaag

SEQ ID NO: 6094 - RNA, 142 nt, synthetic construct
  source 1..142: mol_type = other RNA
gagtactgtgggtactcgaaggttttagagctagaaatagcaagttaaaataaggctagtccgttatcaacttgaaaaagtggcaccgagtcggtgcgtgtggtacgcagccccttcgagtacccacagactgttactcgaa

SEQ ID NO: 6095 - RNA, 142 nt, synthetic construct
  source 1..142: mol_type = other RNA
gagtactgtgggtactcgaaggttttagagctagaaatagcaagttaaaataaggctagtccgttatcaacttgaaaaagtggcaccgagtcggtgcgtgtggtacgcagccccttcgagtacccacagtctgttactcgaa

SEQ ID NO: 6096 - RNA, 141 nt, synthetic construct
  source 1..141: mol_type = other RNA
gagtactgtgggtactcgaaggttttagagctagaaatagcaagttaaaataaggctagtccgttatcaacttgaaaaagtggcaccgagtcggtgcgtgtggtacgcagccccttcgagtacccacagtgttgtactcga

SEQ ID NO: 6097 - RNA, 143 nt, synthetic construct
  source 1..143: mol_type = other RNA
gagtactgtgggtactcgaaggttttagagctagaaatagcaagttaaaataaggctagtccgttatcaacttgaaaaagtggcaccgagtcggtgcgtgtggtacgcagccccttcgagtacccacagacatgtgtactcga

SEQ ID NO: 6098 - RNA, 143 nt, synthetic construct
  source 1..143: mol_type = other RNA
gagtactgtgggtactcgaaggttttagagctagaaatagcaagttaaaataaggctagtccgttatcaacttgaaaaagtggcaccgagtcggtgcgtgtggtacgcagccccttcgagtacccacagatctctggtactcg

SEQ ID NO: 6099 - RNA, 143 nt, synthetic construct
  source 1..143: mol_type = other RNA
gagtactgtgggtactcgaaggttttagagctagaaatagcaagttaaaataaggctagtccgttatcaacttgaaaaagtggcaccgagtcggtgcgtgtggtacgcagccccttcgagtacccacagatatctggtactcg

SEQ ID NO: 6100 - RNA, 143 nt, synthetic construct
  source 1..143: mol_type = other RNA
gagtactgtgggtactcgaaggttttagagctagaaatagcaagttaaaataaggctagtccgttatcaacttgaaaaagtggcaccgagtcggtgcgtgtggtacgcagccccttcgagtacccacagtcacaggggtactc

SEQ ID NO: 6101 - RNA, 143 nt, synthetic construct
  source 1..143: mol_type = other RNA
gagtactgtgggtactcgaaggttttagagctagaaatagcaagttaaaataaggctagtccgttatcaacttgaaaaagtggcaccgagtcggtgcgtgtggtacgcagccccttcgagtacccacagactaaggggtactc

SEQ ID NO: 6102 - RNA, 143 nt, synthetic construct
  source 1..143: mol_type = other RNA
gagtactgtgggtactcgaaggttttagagctagaaatagcaagttaaaataaggctagtccgttatcaacttgaaaaagtggcaccgagtcggtgcgtgtggtacgcagccccttcgagtacccacagctatcttgggtact

SEQ ID NO: 6103 - RNA, 143 nt, synthetic construct
  source 1..143: mol_type = other RNA
gagtactgtgggtactcgaaggttttagagctagaaatagcaagttaaaataaggctagtccgttatcaacttgaaaaagtggcaccgagtcggtgcgtgtggtacgcagccccttcgagtacccacagcgctcttgggtact

SEQ ID NO: 6104 - RNA, 140 nt, synthetic construct
  source 1..140: mol_type = other RNA
gagtactgtgggtactcgaaggttttagagctagaaatagcaagttaaaataaggctagtccgttatcaacttgaaaaagtggcaccgagtcggtgcgtgtggtacgcagccccttcgagtacccacaggttgtgggtac

SEQ ID NO: 6105 - RNA, 140 nt, synthetic construct
  source 1..140: mol_type = other RNA
gagtactgtgggtactcgaaggttttagagctagaaatagcaagttaaaataaggctagtccgttatcaacttgaaaaagtggcaccgagtcggtgcgtgtggtacgcagccccttcgagtacccacagcctgtgggtac

SEQ ID NO: 6106 - RNA, 143 nt, synthetic construct
  source 1..143: mol_type = other RNA
gagtactgtgggtactcgaaggttttagagctagaaatagcaagttaaaataaggctagtccgttatcaacttgaaaaagtggcaccgagtcggtgcgtgtggtacgcagccccttcgagtacccacagacctattgtgggta

SEQ ID NO: 6107 - RNA, 143 nt, synthetic construct
  source 1..143: mol_type = other RNA
gagtactgtgggtactcgaaggttttagagctagaaatagcaagttaaaataaggctagtccgttatcaacttgaaaaagtggcaccgagtcggtgcgtgtggtacgcagccccttcgagtacccacagagctattgtgggta

SEQ ID NO: 6108 - RNA, 143 nt, synthetic construct
  source 1..143: mol_type = other RNA
gagtactgtgggtactcgaaggttttagagctagaaatagcaagttaaaataaggctagtccgttatcaacttgaaaaagtggcaccgagtcggtgcgtgtggtacgcagccccttcgagtacccacaggtccctctgtgggt

SEQ ID NO: 6109 - RNA, 143 nt, synthetic construct
  source 1..143: mol_type = other RNA
gagtactgtgggtactcgaaggttttagagctagaaatagcaagttaaaataaggctagtccgttatcaacttgaaaaagtggcaccgagtcggtgcgtgtggtacgcagccccttcgagtacccacaggtgcctctgtgggt

SEQ ID NO: 6110 - RNA, 129 nt, synthetic construct
  source 1..129: mol_type = other RNA
gcagctctggatcctggtatgttttagagctagaaatagcaagttaaaataaggctagtccgttatcaacttgaaaaagtggcaccgagtcggtgcagaaaccaaatacagctcccaataccaggatcc

SEQ ID NO: 6111 - RNA, 137 nt, synthetic construct
  source 1..137: mol_type = other RNA
gcagctctggatcctggtatgttttagagctagaaatagcaagttaaaataaggctagtccgttatcaacttgaaaaagtggcaccgagtcggtgcagaaaccaaatacagctcccaataccaggatccgcggttct

SEQ ID NO: 6112 - RNA, 139 nt, synthetic construct
  source 1..139: mol_type = other RNA
gcagctctggatcctggtatgttttagagctagaaatagcaagttaaaataaggctagtccgttatcaacttgaaaaagtggcaccgagtcggtgcagaaaccaaatacagctcccaataccaggatccttaaggttct

SEQ ID NO: 6113 - RNA, 134 nt, synthetic construct
  source 1..134: mol_type = other RNA
gcagctctggatcctggtatgttttagagctagaaatagcaagttaaaataaggctagtccgttatcaacttgaaaaagtggcaccgagtcggtgcagaaaccaaatacagctcccaataccaggatccgggtt

SEQ ID NO: 6114 - RNA, 136 nt, synthetic construct
  source 1..136: mol_type = other RNA
gcagctctggatcctggtatgttttagagctagaaatagcaagttaaaataaggctagtccgttatcaacttgaaaaagtggcaccgagtcggtgcagaaaccaaatacagctcccaataccaggatccctaggtt

SEQ ID NO: 6115 - RNA, 136 nt, synthetic construct
  source 1..136: mol_type = other RNA
gcagctctggatcctggtatgttttagagctagaaatagcaagttaaaataaggctagtccgttatcaacttgaaaaagtggcaccgagtcggtgcagaaaccaaatacagctcccaataccaggatccctatggt

SEQ ID NO: 6116 - RNA, 136 nt, synthetic construct
  source 1..136: mol_type = other RNA
gcagctctggatcctggtatgttttagagctagaaatagcaagttaaaataaggctagtccgttatcaacttgaaaaagtggcaccgagtcggtgcagaaaccaaatacagctcccaataccaggatccttatggt

SEQ ID NO: 6117 - RNA, 136 nt, synthetic construct
  source 1..136: mol_type = other RNA
gcagctctggatcctggtatgttttagagctagaaatagcaagttaaaataaggctagtccgttatcaacttgaaaaagtggcaccgagtcggtgcagaaaccaaatacagctcccaataccaggatccttattgg

SEQ ID NO: 6118 - RNA, 139 nt, synthetic construct
  source 1..139: mol_type = other RNA
gcagctctggatcctggtatgttttagagctagaaatagcaagttaaaataaggctagtccgttatcaacttgaaaaagtggcaccgagtcggtgcagaaaccaaatacagctcccaataccaggatccttcttgttgg

SEQ ID NO: 6119 - RNA, 139 nt, synthetic construct
  source 1..139: mol_type = other RNA
gcagctctggatcctggtatgttttagagctagaaatagcaagttaaaataaggctagtccgttatcaacttgaaaaagtggcaccgagtcggtgcagaaaccaaatacagctcccaataccaggatccgataagtatt

SEQ ID NO: 6120 - RNA, 139 nt, synthetic construct
  source 1..139: mol_type = other RNA
gcagctctggatcctggtatgttttagagctagaaatagcaagttaaaataaggctagtccgttatcaacttgaaaaagtggcaccgagtcggtgcagaaaccaaatacagctcccaataccaggatccgattagtatt

SEQ ID NO: 6121 - RNA, 139 nt, synthetic construct
  source 1..139: mol_type = other RNA
gcagctctggatcctggtatgttttagagctagaaatagcaagttaaaataaggctagtccgttatcaacttgaaaaagtggcaccgagtcggtgcagaaaccaaatacagctcccaataccaggatcctaggacgtat

SEQ ID NO: 6122 - RNA, 139 nt, synthetic construct
  source 1..139: mol_type = other RNA
gcagctctggatcctggtatgttttagagctagaaatagcaagttaaaataaggctagtccgttatcaacttgaaaaagtggcaccgagtcggtgcagaaaccaaatacagctcccaataccaggatcccaggacgtat

SEQ ID NO: 6123 - RNA, 139 nt, synthetic construct
  source 1..139: mol_type = other RNA
gcagctctggatcctggtatgttttagagctagaaatagcaagttaaaataaggctagtccgttatcaacttgaaaaagtggcaccgagtcggtgcagaaaccaaatacagctcccaataccaggatcctattattgta

SEQ ID NO: 6124 - RNA, 139 nt, synthetic construct
  source 1..139: mol_type = other RNA
gcagctctggatcctggtatgttttagagctagaaatagcaagttaaaataaggctagtccgttatcaacttgaaaaagtggcaccgagtcggtgcagaaaccaaatacagctcccaataccaggatcctctacttgta

SEQ ID NO: 6125 - RNA, 139 nt, synthetic construct
  source 1..139: mol_type = other RNA
gcagctctggatcctggtatgttttagagctagaaatagcaagttaaaataaggctagtccgttatcaacttgaaaaagtggcaccgagtcggtgcagaaaccaaatacagctcccaataccaggatccgaccctctgt

SEQ ID NO: 6126 - RNA, 139 nt, synthetic construct
  source 1..139: mol_type = other RNA
gcagctctggatcctggtatgttttagagctagaaatagcaagttaaaataaggctagtccgttatcaacttgaaaaagtggcaccgagtcggtgcagaaaccaaatacagctcccaataccaggatccctccctctgt

SEQ ID NO: 6127 - RNA, 139 nt, synthetic construct
  source 1..139: mol_type = other RNA
gcagctctggatcctggtatgttttagagctagaaatagcaagttaaaataaggctagtccgttatcaacttgaaaaagtggcaccgagtcggtgcagaaaccaaatacagctcccaataccaggatccgtaaaggctg

SEQ ID NO: 6128 - RNA, 139 nt, synthetic construct
  source 1..139: mol_type = other RNA
gcagctctggatcctggtatgttttagagctagaaatagcaagttaaaataaggctagtccgttatcaacttgaaaaagtggcaccgagtcggtgcagaaaccaaatacagctcccaataccaggatccgtgacggctg

SEQ ID NO: 6129 - RNA, 139 nt, synthetic construct
  source 1..139: mol_type = other RNA
gcagctctggatcctggtatgttttagagctagaaatagcaagttaaaataaggctagtccgttatcaacttgaaaaagtggcaccgagtcggtgcagaaaccaaatacagctcccaataccaggatccctcgatagct

SEQ ID NO: 6130 - RNA, 139 nt, synthetic construct
  source 1..139: mol_type = other RNA
gcagctctggatcctggtatgttttagagctagaaatagcaagttaaaataaggctagtccgttatcaacttgaaaaagtggcaccgagtcggtgcagaaaccaaatacagctcccaataccaggatccttgcccagct

SEQ ID NO: 6131 - RNA, 139 nt, synthetic construct
  source 1..139: mol_type = other RNA
gcagctctggatcctggtatgttttagagctagaaatagcaagttaaaataaggctagtccgttatcaacttgaaaaagtggcaccgagtcggtgcagaaaccaaatacagctcccaataccaggatcccagttcgagc

SEQ ID NO: 6132 - RNA, 139 nt, synthetic construct
  source 1..139: mol_type = other RNA
gcagctctggatcctggtatgttttagagctagaaatagcaagttaaaataaggctagtccgttatcaacttgaaaaagtggcaccgagtcggtgcagaaaccaaatacagctcccaataccaggatccgcgattgagc

SEQ ID NO: 6133 - RNA, 139 nt, synthetic construct
  source 1..139: mol_type = other RNA
gcagctctggatcctggtatgttttagagctagaaatagcaagttaaaataaggctagtccgttatcaacttgaaaaagtggcaccgagtcggtgcagaaaccaaatacagctcccaataccaggatcccaatatggag

SEQ ID NO: 6134 - RNA, 139 nt, synthetic construct
  source 1..139: mol_type = other RNA
gcagctctggatcctggtatgttttagagctagaaatagcaagttaaaataaggctagtccgttatcaacttgaaaaagtggcaccgagtcggtgcagaaaccaaatacagctcccaataccaggatcccactatggag

SEQ ID NO: 6135 - RNA, 136 nt, synthetic construct
  source 1..136: mol_type = other RNA
gcagctctggatcctggtatgttttagagctagaaatagcaagttaaaataaggctagtccgttatcaacttgaaaaagtggcaccgagtcggtgcagaaaccaaatacagctcccaataccaggatcctatggga

SEQ ID NO: 6136 - RNA, 136 nt, synthetic construct
  source 1..136: mol_type = other RNA
gcagctctggatcctggtatgttttagagctagaaatagcaagttaaaataaggctagtccgttatcaacttgaaaaagtggcaccgagtcggtgcagaaaccaaatacagctcccaataccaggatcccatggga

SEQ ID NO: 6137 - RNA, 139 nt, synthetic construct
  source 1..139: mol_type = other RNA
gcagctctggatcctggtatgttttagagctagaaatagcaagttaaaataaggctagtccgttatcaacttgaaaaagtggcaccgagtcggtgcagaaaccaaatacagctcccaataccaggatcccaacattggg

SEQ ID NO: 6138 - RNA, 139 nt, synthetic construct
  source 1..139: mol_type = other RNA
gcagctctggatcctggtatgttttagagctagaaatagcaagttaaaataaggctagtccgttatcaacttgaaaaagtggcaccgagtcggtgcagaaaccaaatacagctcccaataccaggatcccacaattggg

SEQ ID NO: 6139 - RNA, 139 nt, synthetic construct
  source 1..139: mol_type = other RNA
gcagctctggatcctggtatgttttagagctagaaatagcaagttaaaataaggctagtccgttatcaacttgaaaaagtggcaccgagtcggtgcagaaaccaaatacagctcccaataccaggatcctccttattgg

SEQ ID NO: 6140 - RNA, 138 nt, synthetic construct
  source 1..138: mol_type = other RNA
gcagctctggatcctggtatgttttagagctagaaatagcaagttaaaataaggctagtccgttatcaacttgaaaaagtggcaccgagtcggtgcagaaaccaaatacagctcccaataccaggatccccggattgg

SEQ ID NO: 6141 - RNA, 139 nt, synthetic construct
  source 1..139: mol_type = other RNA
gcagctctggatcctggtatgttttagagctagaaatagcaagttaaaataaggctagtccgttatcaacttgaaaaagtggcaccgagtcggtgcagaaaccaaatacagctcccaataccaggatcccaagatattg

SEQ ID NO: 6142 - RNA, 139 nt, synthetic construct
  source 1..139: mol_type = other RNA
gcagctctggatcctggtatgttttagagctagaaatagcaagttaaaataaggctagtccgttatcaacttgaaaaagtggcaccgagtcggtgcagaaaccaaatacagctcccaataccaggatcccaagttattg

SEQ ID NO: 6143 - RNA, 139 nt, synthetic construct
  source 1..139: mol_type = other RNA
gcagctctggatcctggtatgttttagagctagaaatagcaagttaaaataaggctagtccgttatcaacttgaaaaagtggcaccgagtcggtgcagaaaccaaatacagctcccaataccaggatcccacgagtatt

SEQ ID NO: 6144 - RNA, 139 nt, synthetic construct
  source 1..139: mol_type = other RNA
gcagctctggatcctggtatgttttagagctagaaatagcaagttaaaataaggctagtccgttatcaacttgaaaaagtggcaccgagtcggtgcagaaaccaaatacagctcccaataccaggatccccaaagtatt

SEQ ID NO: 6145 - RNA, 139 nt, synthetic construct
  source 1..139: mol_type = other RNA
gcagctctggatcctggtatgttttagagctagaaatagcaagttaaaataaggctagtccgttatcaacttgaaaaagtggcaccgagtcggtgcagaaaccaaatacagctcccaataccaggatccccaaccgtat

SEQ ID NO: 6146 - RNA, 139 nt, synthetic construct
  source 1..139: mol_type = other RNA
gcagctctggatcctggtatgttttagagctagaaatagcaagttaaaataaggctagtccgttatcaacttgaaaaagtggcaccgagtcggtgcagaaaccaaatacagctcccaataccaggatccgaaaccgtat

SEQ ID NO: 6147 - RNA, 139 nt, synthetic construct
  source 1..139: mol_type = other RNA
gcagctctggatcctggtatgttttagagctagaaatagcaagttaaaataaggctagtccgttatcaacttgaaaaagtggcaccgagtcggtgcagaaaccaaatacagctcccaataccaggatcctatatcggta

SEQ ID NO: 6148 - RNA, 139 nt, synthetic construct
  source 1..139: mol_type = other RNA
gcagctctggatcctggtatgttttagagctagaaatagcaagttaaaataaggctagtccgttatcaacttgaaaaagtggcaccgagtcggtgcagaaaccaaatacagctcccaataccaggatccgatatcggta

SEQ ID NO: 6149 - RNA, 135 nt, synthetic construct
  source 1..135: mol_type = other RNA
gcagctctggatcctggtatgttttagagctagaaatagcaagttaaaataaggctagtccgttatcaacttgaaaaagtggcaccgagtcggtgcagaaaccaaatacagctcccaataccaggatcctctggt

SEQ ID NO: 6150 - RNA, 136 nt, synthetic construct
  source 1..136: mol_type = other RNA
gcagctctggatcctggtatgttttagagctagaaatagcaagttaaaataaggctagtccgttatcaacttgaaaaagtggcaccgagtcggtgcagaaaccaaatacagctcccaataccaggatccttctggt

SEQ ID NO: 6151 - RNA, 134 nt, synthetic construct
  source 1..134: mol_type = other RNA
gcagctctggatcctggtatgttttagagctagaaatagcaagttaaaataaggctagtccgttatcaacttgaaaaagtggcaccgagtcggtgcagaaaccaaatacagctcccaataccaggatcctctgg

SEQ ID NO: 6152 - RNA, 135 nt, synthetic construct
  source 1..135: mol_type = other RNA
gcagctctggatcctggtatgttttagagctagaaatagcaagttaaaataaggctagtccgttatcaacttgaaaaagtggcaccgagtcggtgcagaaaccaaatacagctcccaataccaggatccttctgg

SEQ ID NO: 6153 - RNA, 138 nt, synthetic construct
  source 1..138: mol_type = other RNA
gcagctctggatcctggtatgttttagagctagaaatagcaagttaaaataaggctagtccgttatcaacttgaaaaagtggcaccgagtcggtgcagaaaccaaatacagctcccaataccaggatcccatggcctg

SEQ ID NO: 6154 - RNA, 138 nt, synthetic construct
  source 1..138: mol_type = other RNA
gcagctctggatcctggtatgttttagagctagaaatagcaagttaaaataaggctagtccgttatcaacttgaaaaagtggcaccgagtcggtgcagaaaccaaatacagctcccaataccaggatccgatggcctg

SEQ ID NO: 6155 - RNA, 139 nt, synthetic construct
  source 1..139: mol_type = other RNA
gcagctctggatcctggtatgttttagagctagaaatagcaagttaaaataaggctagtccgttatcaacttgaaaaagtggcaccgagtcggtgcagaaaccaaatacagctcccaataccaggatccgaagtatcct

SEQ ID NO: 6156 - RNA, 139 nt, synthetic construct
  source 1..139: mol_type = other RNA
gcagctctggatcctggtatgttttagagctagaaatagcaagttaaaataaggctagtccgttatcaacttgaaaaagtggcaccgagtcggtgcagaaaccaaatacagctcccaataccaggatccccgatatcct

SEQ ID NO: 6157 - RNA, 136 nt, synthetic construct
  source 1..136: mol_type = other RNA
gcagctctggatcctggtatgttttagagctagaaatagcaagttaaaataaggctagtccgttatcaacttgaaaaagtggcaccgagtcggtgcagaaaccaaatacagctcccaataccaggatccccgatcc

SEQ ID NO: 6158 - RNA, 136 nt, synthetic construct
  source 1..136: mol_type = other RNA
gcagctctggatcctggtatgttttagagctagaaatagcaagttaaaataaggctagtccgttatcaacttgaaaaagtggcaccgagtcggtgcagaaaccaaatacagctcccaataccaggatccgtgatcc

SEQ ID NO: 6159 - RNA, 137 nt, synthetic construct
  source 1..137: mol_type = other RNA
gcagctctggatcctggtatgttttagagctagaaatagcaagttaaaataaggctagtccgttatcaacttgaaaaagtggcaccgagtcggtgcagaaaccaaatacagctcccaataccaggatccttcggatc

SEQ ID NO: 6160 - RNA, 137 nt, synthetic construct
  source 1..137: mol_type = other RNA
gcagctctggatcctggtatgttttagagctagaaatagcaagttaaaataaggctagtccgttatcaacttgaaaaagtggcaccgagtcggtgcagaaaccaaatacagctcccaataccaggatccgcgggatc

SEQ ID NO: 6161 - RNA, 138 nt, synthetic construct
  source 1..138: mol_type = other RNA
gcagctctggatcctggtatgttttagagctagaaatagcaagttaaaataaggctagtccgttatcaacttgaaaaagtggcaccgagtcggtgcagaaaccaaatacagctcccaataccaggatcctatagggat

SEQ ID NO: 6162 - RNA, 138 nt, synthetic construct
  source 1..138: mol_type = other RNA
gcagctctggatcctggtatgttttagagctagaaatagcaagttaaaataaggctagtccgttatcaacttgaaaaagtggcaccgagtcggtgcagaaaccaaatacagctcccaataccaggatcctcacaggat

SEQ ID NO: 6163 - RNA, 138 nt, synthetic construct
  source 1..138: mol_type = other RNA
gcagctctggatcctggtatgttttagagctagaaatagcaagttaaaataaggctagtccgttatcaacttgaaaaagtggcaccgagtcggtgcagaaaccaaatacagctcccaataccaggatccttattggtt

SEQ ID NO: 6164 - RNA, 138 nt, synthetic construct
  source 1..138: mol_type = other RNA
gcagctctggatcctggtatgttttagagctagaaatagcaagttaaaataaggctagtccgttatcaacttgaaaaagtggcaccgagtcggtgcagaaaccaaatacagctcccaataccaggatccctattggtt

SEQ ID NO: 6165 - RNA, 141 nt, synthetic construct
  source 1..141: mol_type = other RNA
gcagctctggatcctggtatgttttagagctagaaatagcaagttaaaataaggctagtccgttatcaacttgaaaaagtggcaccgagtcggtgcagaaaccaaatacagctcccaataccaggatcccctcattgtatt

SEQ ID NO: 6166 - RNA, 141 nt, synthetic construct
  source 1..141: mol_type = other RNA
gcagctctggatcctggtatgttttagagctagaaatagcaagttaaaataaggctagtccgttatcaacttgaaaaagtggcaccgagtcggtgcagaaaccaaatacagctcccaataccaggatccccatattgtatt

SEQ ID NO: 6167 - RNA, 141 nt, synthetic construct
  source 1..141: mol_type = other RNA
gcagctctggatcctggtatgttttagagctagaaatagcaagttaaaataaggctagtccgttatcaacttgaaaaagtggcaccgagtcggtgcagaaaccaaatacagctcccaataccaggatccgttcttctgtat

SEQ ID NO: 6168 - RNA, 141 nt, synthetic construct
  source 1..141: mol_type = other RNA
gcagctctggatcctggtatgttttagagctagaaatagcaagttaaaataaggctagtccgttatcaacttgaaaaagtggcaccgagtcggtgcagaaaccaaatacagctcccaataccaggatcccttcttctgtat

SEQ ID NO: 6169 - RNA, 141 nt, synthetic construct
  source 1..141: mol_type = other RNA
gcagctctggatcctggtatgttttagagctagaaatagcaagttaaaataaggctagtccgttatcaacttgaaaaagtggcaccgagtcggtgcagaaaccaaatacagctcccaataccaggatccgtaacggctgta

SEQ ID NO: 6170 - RNA, 141 nt, synthetic construct
  source 1..141: mol_type = other RNA
gcagctctggatcctggtatgttttagagctagaaatagcaagttaaaataaggctagtccgttatcaacttgaaaaagtggcaccgagtcggtgcagaaaccaaatacagctcccaataccaggatcccatctagctgta

SEQ ID NO: 6171 - RNA, 141 nt, synthetic construct
  source 1..141: mol_type = other RNA
gcagctctggatcctggtatgttttagagctagaaatagcaagttaaaataaggctagtccgttatcaacttgaaaaagtggcaccgagtcggtgcagaaaccaaatacagctcccaataccaggatccgccgccagctgt

SEQ ID NO: 6172 - RNA, 141 nt, synthetic construct
  source 1..141: mol_type = other RNA
gcagctctggatcctggtatgttttagagctagaaatagcaagttaaaataaggctagtccgttatcaacttgaaaaagtggcaccgagtcggtgcagaaaccaaatacagctcccaataccaggatcctacgccagctgt

SEQ ID NO: 6173 - RNA, 141 nt, synthetic construct
  source 1..141: mol_type = other RNA
gcagctctggatcctggtatgttttagagctagaaatagcaagttaaaataaggctagtccgttatcaacttgaaaaagtggcaccgagtcggtgcagaaaccaaatacagctcccaataccaggatcccagttcgagctg

SEQ ID NO: 6174 - RNA, 141 nt, synthetic construct
  source 1..141: mol_type = other RNA
gcagctctggatcctggtatgttttagagctagaaatagcaagttaaaataaggctagtccgttatcaacttgaaaaagtggcaccgagtcggtgcagaaaccaaatacagctcccaataccaggatcccagattgagctg

SEQ ID NO: 6175 - RNA, 141 nt, synthetic construct
  source 1..141: mol_type = other RNA
gcagctctggatcctggtatgttttagagctagaaatagcaagttaaaataaggctagtccgttatcaacttgaaaaagtggcaccgagtcggtgcagaaaccaaatacagctcccaataccaggatcccattatggagct

SEQ ID NO: 6176 - RNA, 140 nt, synthetic construct
  source 1..140: mol_type = other RNA
gcagctctggatcctggtatgttttagagctagaaatagcaagttaaaataaggctagtccgttatcaacttgaaaaagtggcaccgagtcggtgcagaaaccaaatacagctcccaataccaggatcctagctggagct

SEQ ID NO: 6177 - RNA, 141 nt, synthetic construct
  source 1..141: mol_type = other RNA
gcagctctggatcctggtatgttttagagctagaaatagcaagttaaaataaggctagtccgttatcaacttgaaaaagtggcaccgagtcggtgcagaaaccaaatacagctcccaataccaggatccgaagtggggagc

SEQ ID NO: 6178 - RNA, 141 nt, synthetic construct
  source 1..141: mol_type = other RNA
gcagctctggatcctggtatgttttagagctagaaatagcaagttaaaataaggctagtccgttatcaacttgaaaaagtggcaccgagtcggtgcagaaaccaaatacagctcccaataccaggatccgcagtggggagc

SEQ ID NO: 6179 - RNA, 141 nt, synthetic construct
  source 1..141: mol_type = other RNA
gcagctctggatcctggtatgttttagagctagaaatagcaagttaaaataaggctagtccgttatcaacttgaaaaagtggcaccgagtcggtgcagaaaccaaatacagctcccaataccaggatccgcattctgggag

SEQ ID NO: 6180 - RNA, 140 nt, synthetic construct
  source 1..140: mol_type = other RNA
gcagctctggatcctggtatgttttagagctagaaatagcaagttaaaataaggctagtccgttatcaacttgaaaaagtggcaccgagtcggtgcagaaaccaaatacagctcccaataccaggatccgaacctgggag

SEQ ID NO: 6181 - RNA, 141 nt, synthetic construct
  source 1..141: mol_type = other RNA
gcagctctggatcctggtatgttttagagctagaaatagcaagttaaaataaggctagtccgttatcaacttgaaaaagtggcaccgagtcggtgcagaaaccaaatacagctcccaataccaggatccgaaacattggga

SEQ ID NO: 6182 - RNA, 141 nt, synthetic construct
  source 1..141: mol_type = other RNA
gcagctctggatcctggtatgttttagagctagaaatagcaagttaaaataaggctagtccgttatcaacttgaaaaagtggcaccgagtcggtgcagaaaccaaatacagctcccaataccaggatccgacacattggga

SEQ ID NO: 6183 - RNA, 141 nt, synthetic construct
  source 1..141: mol_type = other RNA
gcagctctggatcctggtatgttttagagctagaaatagcaagttaaaataaggctagtccgttatcaacttgaaaaagtggcaccgagtcggtgcagaaaccaaatacagctcccaataccaggatcctacatcattggg

SEQ ID NO: 6184 - RNA, 141 nt, synthetic construct
  source 1..141: mol_type = other RNA
gcagctctggatcctggtatgttttagagctagaaatagcaagttaaaataaggctagtccgttatcaacttgaaaaagtggcaccgagtcggtgcagaaaccaaatacagctcccaataccaggatccttaatcattggg

SEQ ID NO: 6185 - RNA, 141 nt, synthetic construct
  source 1..141: mol_type = other RNA
gcagctctggatcctggtatgttttagagctagaaatagcaagttaaaataaggctagtccgttatcaacttgaaaaagtggcaccgagtcggtgcagaaaccaaatacagctcccaataccaggatcctaaccttattgg

SEQ ID NO: 6186 - RNA, 141 nt, synthetic construct
  source 1..141: mol_type = other RNA
gcagctctggatcctggtatgttttagagctagaaatagcaagttaaaataaggctagtccgttatcaacttgaaaaagtggcaccgagtcggtgcagaaaccaaatacagctcccaataccaggatcccaaccttattgg

SEQ ID NO: 6187 - RNA, 141 nt, synthetic construct
  source 1..141: mol_type = other RNA
gcagctctggatcctggtatgttttagagctagaaatagcaagttaaaataaggctagtccgttatcaacttgaaaaagtggcaccgagtcggtgcagaaaccaaatacagctcccaataccaggatccgatatcgtattg

SEQ ID NO: 6188 - RNA, 141 nt, synthetic construct
  source 1..141: mol_type = other RNA
gcagctctggatcctggtatgttttagagctagaaatagcaagttaaaataaggctagtccgttatcaacttgaaaaagtggcaccgagtcggtgcagaaaccaaatacagctcccaataccaggatcccatatcgtattg

SEQ ID NO: 6189 - RNA, 141 nt, synthetic construct
  source 1..141: mol_type = other RNA
gcagctctggatcctggtatgttttagagctagaaatagcaagttaaaataaggctagtccgttatcaacttgaaaaagtggcaccgagtcggtgcagaaaccaaatacagctcccaataccaggatcccatatcggtatt

SEQ ID NO: 6190 - RNA, 141 nt, synthetic construct
  source 1..141: mol_type = other RNA
gcagctctggatcctggtatgttttagagctagaaatagcaagttaaaataaggctagtccgttatcaacttgaaaaagtggcaccgagtcggtgcagaaaccaaatacagctcccaataccaggatcctatatcggtatt

SEQ ID NO: 6191 - RNA, 141 nt, synthetic construct
  source 1..141: mol_type = other RNA
gcagctctggatcctggtatgttttagagctagaaatagcaagttaaaataaggctagtccgttatcaacttgaaaaagtggcaccgagtcggtgcagaaaccaaatacagctcccaataccaggatccttaaggtggtat

SEQ ID NO: 6192 - RNA, 141 nt, synthetic construct
  source 1..141: mol_type = other RNA
gcagctctggatcctggtatgttttagagctagaaatagcaagttaaaataaggctagtccgttatcaacttgaaaaagtggcaccgagtcggtgcagaaaccaaatacagctcccaataccaggatccctaaggtggtat

SEQ ID NO: 6193 - RNA, 139 nt, synthetic construct
  source 1..139: mol_type = other RNA
gcagctctggatcctggtatgttttagagctagaaatagcaagttaaaataaggctagtccgttatcaacttgaaaaagtggcaccgagtcggtgcagaaaccaaatacagctcccaataccaggatccttatctggta

SEQ ID NO: 6194 - RNA, 139 nt, synthetic construct
  source 1..139: mol_type = other RNA
gcagctctggatcctggtatgttttagagctagaaatagcaagttaaaataaggctagtccgttatcaacttgaaaaagtggcaccgagtcggtgcagaaaccaaatacagctcccaataccaggatccgaatctggta

SEQ ID NO: 6195 - RNA, 140 nt, synthetic construct
  source 1..140: mol_type = other RNA
gcagctctggatcctggtatgttttagagctagaaatagcaagttaaaataaggctagtccgttatcaacttgaaaaagtggcaccgagtcggtgcagaaaccaaatacagctcccaataccaggatcctatggcctggt

SEQ ID NO: 6196 - RNA, 140 nt, synthetic construct
  source 1..140: mol_type = other RNA
gcagctctggatcctggtatgttttagagctagaaatagcaagttaaaataaggctagtccgttatcaacttgaaaaagtggcaccgagtcggtgcagaaaccaaatacagctcccaataccaggatcccttggcctggt

SEQ ID NO: 6197 - RNA, 141 nt, synthetic construct
  source 1..141: mol_type = other RNA
gcagctctggatcctggtatgttttagagctagaaatagcaagttaaaataaggctagtccgttatcaacttgaaaaagtggcaccgagtcggtgcagaaaccaaatacagctcccaataccaggatcctctatatcctgg

SEQ ID NO: 6198 - RNA, 141 nt, synthetic construct
  source 1..141: mol_type = other RNA
gcagctctggatcctggtatgttttagagctagaaatagcaagttaaaataaggctagtccgttatcaacttgaaaaagtggcaccgagtcggtgcagaaaccaaatacagctcccaataccaggatccttcctatcctgg

SEQ ID NO: 6199 - RNA, 138 nt, synthetic construct
  source 1..138: mol_type = other RNA
gcagctctggatcctggtatgttttagagctagaaatagcaagttaaaataaggctagtccgttatcaacttgaaaaagtggcaccgagtcggtgcagaaaccaaatacagctcccaataccaggatcccagatcctg

SEQ ID NO: 6200 - RNA, 138 nt, synthetic construct
  source 1..138: mol_type = other RNA
gcagctctggatcctggtatgttttagagctagaaatagcaagttaaaataaggctagtccgttatcaacttgaaaaagtggcaccgagtcggtgcagaaaccaaatacagctcccaataccaggatccgtgatcctg

SEQ ID NO: 6201 - RNA, 139 nt, synthetic construct
  source 1..139: mol_type = other RNA
gcagctctggatcctggtatgttttagagctagaaatagcaagttaaaataaggctagtccgttatcaacttgaaaaagtggcaccgagtcggtgcagaaaccaaatacagctcccaataccaggatcccttggatcct

SEQ ID NO: 6202 - RNA, 139 nt, synthetic construct
  source 1..139: mol_type = other RNA
gcagctctggatcctggtatgttttagagctagaaatagcaagttaaaataaggctagtccgttatcaacttgaaaaagtggcaccgagtcggtgcagaaaccaaatacagctcccaataccaggatccctcggatcct

SEQ ID NO: 6203 - RNA, 140 nt, synthetic construct
  source 1..140: mol_type = other RNA
gcagctctggatcctggtatgttttagagctagaaatagcaagttaaaataaggctagtccgttatcaacttgaaaaagtggcaccgagtcggtgcagaaaccaaatacagctcccaataccaggatcctagggggatcc

SEQ ID NO: 6204 - RNA, 140 nt, synthetic construct
  source 1..140: mol_type = other RNA
gcagctctggatcctggtatgttttagagctagaaatagcaagttaaaataaggctagtccgttatcaacttgaaaaagtggcaccgagtcggtgcagaaaccaaatacagctcccaataccaggatcctcggaggatcc

SEQ ID NO: 6205 - RNA, 143 nt, synthetic construct
  source 1..143: mol_type = other RNA
gcagctctggatcctggtatgttttagagctagaaatagcaagttaaaataaggctagtccgttatcaacttgaaaaagtggcaccgagtcggtgcagaaaccaaatacagctcccaataccaggatccgtgacggctgtatt

SEQ ID NO: 6206 - RNA, 143 nt, synthetic construct
  source 1..143: mol_type = other RNA
gcagctctggatcctggtatgttttagagctagaaatagcaagttaaaataaggctagtccgttatcaacttgaaaaagtggcaccgagtcggtgcagaaaccaaatacagctcccaataccaggatccgtacaggctgtatt

SEQ ID NO: 6207 - RNA, 143 nt, synthetic construct
  source 1..143: mol_type = other RNA
gcagctctggatcctggtatgttttagagctagaaatagcaagttaaaataaggctagtccgttatcaacttgaaaaagtggcaccgagtcggtgcagaaaccaaatacagctcccaataccaggatcctatgccagctgtat

SEQ ID NO: 6208 - RNA, 143 nt, synthetic construct
  source 1..143: mol_type = other RNA
gcagctctggatcctggtatgttttagagctagaaatagcaagttaaaataaggctagtccgttatcaacttgaaaaagtggcaccgagtcggtgcagaaaccaaatacagctcccaataccaggatccctagccagctgtat

SEQ ID NO: 6209 - RNA, 143 nt, synthetic construct
  source 1..143: mol_type = other RNA
gcagctctggatcctggtatgttttagagctagaaatagcaagttaaaataaggctagtccgttatcaacttgaaaaagtggcaccgagtcggtgcagaaaccaaatacagctcccaataccaggatccgagttcgagctgta

SEQ ID NO: 6210 - RNA, 143 nt, synthetic construct
  source 1..143: mol_type = other RNA
gcagctctggatcctggtatgttttagagctagaaatagcaagttaaaataaggctagtccgttatcaacttgaaaaagtggcaccgagtcggtgcagaaaccaaatacagctcccaataccaggatccgcgattgagctgta

SEQ ID NO: 6211 - RNA, 143 nt, synthetic construct
  source 1..143: mol_type = other RNA
gcagctctggatcctggtatgttttagagctagaaatagcaagttaaaataaggctagtccgttatcaacttgaaaaagtggcaccgagtcggtgcagaaaccaaatacagctcccaataccaggatcccactatggagctgt

SEQ ID NO: 6212 - RNA, 142 nt, synthetic construct
  source 1..142: mol_type = other RNA
gcagctctggatcctggtatgttttagagctagaaatagcaagttaaaataaggctagtccgttatcaacttgaaaaagtggcaccgagtcggtgcagaaaccaaatacagctcccaataccaggatccgcgctggagctgt

SEQ ID NO: 6213 - RNA, 143 nt, synthetic construct
  source 1..143: mol_type = other RNA
gcagctctggatcctggtatgttttagagctagaaatagcaagttaaaataaggctagtccgttatcaacttgaaaaagtggcaccgagtcggtgcagaaaccaaatacagctcccaataccaggatccgaagtggggagctg

SEQ ID NO: 6214 - RNA, 142 nt, synthetic construct
  source 1..142: mol_type = other RNA
gcagctctggatcctggtatgttttagagctagaaatagcaagttaaaataaggctagtccgttatcaacttgaaaaagtggcaccgagtcggtgcagaaaccaaatacagctcccaataccaggatccgcccggggagctg

SEQ ID NO: 6215 - RNA, 142 nt, synthetic construct
  source 1..142: mol_type = other RNA
gcagctctggatcctggtatgttttagagctagaaatagcaagttaaaataaggctagtccgttatcaacttgaaaaagtggcaccgagtcggtgcagaaaccaaatacagctcccaataccaggatcccaacctgggagct

SEQ ID NO: 6216 - RNA, 142 nt, synthetic construct
  source 1..142: mol_type = other RNA
gcagctctggatcctggtatgttttagagctagaaatagcaagttaaaataaggctagtccgttatcaacttgaaaaagtggcaccgagtcggtgcagaaaccaaatacagctcccaataccaggatccgcacctgggagct

SEQ ID NO: 6217 - RNA, 143 nt, synthetic construct
  source 1..143: mol_type = other RNA
gcagctctggatcctggtatgttttagagctagaaatagcaagttaaaataaggctagtccgttatcaacttgaaaaagtggcaccgagtcggtgcagaaaccaaatacagctcccaataccaggatccgcagcattgggagc

SEQ ID NO: 6218 - RNA, 143 nt, synthetic construct
  source 1..143: mol_type = other RNA
gcagctctggatcctggtatgttttagagctagaaatagcaagttaaaataaggctagtccgttatcaacttgaaaaagtggcaccgagtcggtgcagaaaccaaatacagctcccaataccaggatccgagacattgggagc

SEQ ID NO: 6219 - RNA, 143 nt, synthetic construct
  source 1..143: mol_type = other RNA
gcagctctggatcctggtatgttttagagctagaaatagcaagttaaaataaggctagtccgttatcaacttgaaaaagtggcaccgagtcggtgcagaaaccaaatacagctcccaataccaggatccgacatcattgggag

SEQ ID NO: 6220 - RNA, 143 nt, synthetic construct
  source 1..143: mol_type = other RNA
gcagctctggatcctggtatgttttagagctagaaatagcaagttaaaataaggctagtccgttatcaacttgaaaaagtggcaccgagtcggtgcagaaaccaaatacagctcccaataccaggatcctacatcattgggag

SEQ ID NO: 6221 - RNA, 143 nt, synthetic construct
  source 1..143: mol_type = other RNA
gcagctctggatcctggtatgttttagagctagaaatagcaagttaaaataaggctagtccgttatcaacttgaaaaagtggcaccgagtcggtgcagaaaccaaatacagctcccaataccaggatccttagattattggga

SEQ ID NO: 6222 - RNA, 143 nt, synthetic construct
  source 1..143: mol_type = other RNA
gcagctctggatcctggtatgttttagagctagaaatagcaagttaaaataaggctagtccgttatcaacttgaaaaagtggcaccgagtcggtgcagaaaccaaatacagctcccaataccaggatccgtagattattggga

SEQ ID NO: 6223 - RNA, 143 nt, synthetic construct
  source 1..143: mol_type = other RNA
gcagctctggatcctggtatgttttagagctagaaatagcaagttaaaataaggctagtccgttatcaacttgaaaaagtggcaccgagtcggtgcagaaaccaaatacagctcccaataccaggatcctatatcgtattggg

SEQ ID NO: 6224 - RNA, 143 nt, synthetic construct
  source 1..143: mol_type = other RNA
gcagctctggatcctggtatgttttagagctagaaatagcaagttaaaataaggctagtccgttatcaacttgaaaaagtggcaccgagtcggtgcagaaaccaaatacagctcccaataccaggatccgatatcgtattggg

SEQ ID NO: 6225 - RNA, 143 nt, synthetic construct
  source 1..143: mol_type = other RNA
gcagctctggatcctggtatgttttagagctagaaatagcaagttaaaataaggctagtccgttatcaacttgaaaaagtggcaccgagtcggtgcagaaaccaaatacagctcccaataccaggatcccatatcggtattgg

SEQ ID NO: 6226 - RNA, 143 nt, synthetic construct
  source 1..143: mol_type = other RNA
gcagctctggatcctggtatgttttagagctagaaatagcaagttaaaataaggctagtccgttatcaacttgaaaaagtggcaccgagtcggtgcagaaaccaaatacagctcccaataccaggatccgatatcggtattgg

SEQ ID NO: 6227 - RNA, 143 nt, synthetic construct
  source 1..143: mol_type = other RNA
gcagctctggatcctggtatgttttagagctagaaatagcaagttaaaataaggctagtccgttatcaacttgaaaaagtggcaccgagtcggtgcagaaaccaaatacagctcccaataccaggatcctctaggtggtattg

SEQ ID NO: 6228 - RNA, 143 nt, synthetic construct
  source 1..143: mol_type = other RNA
gcagctctggatcctggtatgttttagagctagaaatagcaagttaaaataaggctagtccgttatcaacttgaaaaagtggcaccgagtcggtgcagaaaccaaatacagctcccaataccaggatccttaaggtggtattg

SEQ ID NO: 6229 - RNA, 141 nt, synthetic construct
  source 1..141: mol_type = other RNA
gcagctctggatcctggtatgttttagagctagaaatagcaagttaaaataaggctagtccgttatcaacttgaaaaagtggcaccgagtcggtgcagaaaccaaatacagctcccaataccaggatccttatctggtatt

SEQ ID NO: 6230 - RNA, 141 nt, synthetic construct
  source 1..141: mol_type = other RNA
gcagctctggatcctggtatgttttagagctagaaatagcaagttaaaataaggctagtccgttatcaacttgaaaaagtggcaccgagtcggtgcagaaaccaaatacagctcccaataccaggatccgaatctggtatt

SEQ ID NO: 6231 - RNA, 142 nt, synthetic construct
  source 1..142: mol_type = other RNA
gcagctctggatcctggtatgttttagagctagaaatagcaagttaaaataaggctagtccgttatcaacttgaaaaagtggcaccgagtcggtgcagaaaccaaatacagctcccaataccaggatcctctggcctggtat

SEQ ID NO: 6232 - RNA, 142 nt, synthetic construct
  source 1..142: mol_type = other RNA
gcagctctggatcctggtatgttttagagctagaaatagcaagttaaaataaggctagtccgttatcaacttgaaaaagtggcaccgagtcggtgcagaaaccaaatacagctcccaataccaggatccgatggcctggtat

SEQ ID NO: 6233 - RNA, 143 nt, synthetic construct
  source 1..143: mol_type = other RNA
gcagctctggatcctggtatgttttagagctagaaatagcaagttaaaataaggctagtccgttatcaacttgaaaaagtggcaccgagtcggtgcagaaaccaaatacagctcccaataccaggatccctaatatcctggta

SEQ ID NO: 6234 - RNA, 143 nt, synthetic construct
  source 1..143: mol_type = other RNA
gcagctctggatcctggtatgttttagagctagaaatagcaagttaaaataaggctagtccgttatcaacttgaaaaagtggcaccgagtcggtgcagaaaccaaatacagctcccaataccaggatcccccatatcctggta

SEQ ID NO: 6235 - RNA, 140 nt, synthetic construct
  source 1..140: mol_type = other RNA
gcagctctggatcctggtatgttttagagctagaaatagcaagttaaaataaggctagtccgttatcaacttgaaaaagtggcaccgagtcggtgcagaaaccaaatacagctcccaataccaggatcctagatcctggt

SEQ ID NO: 6236 - RNA, 140 nt, synthetic construct
  source 1..140: mol_type = other RNA
gcagctctggatcctggtatgttttagagctagaaatagcaagttaaaataaggctagtccgttatcaacttgaaaaagtggcaccgagtcggtgcagaaaccaaatacagctcccaataccaggatccgtgatcctggt

SEQ ID NO: 6237 - RNA, 141 nt, synthetic construct
  source 1..141: mol_type = other RNA
gcagctctggatcctggtatgttttagagctagaaatagcaagttaaaataaggctagtccgttatcaacttgaaaaagtggcaccgagtcggtgcagaaaccaaatacagctcccaataccaggatcctcaggatcctgg

SEQ ID NO: 6238 - RNA, 141 nt, synthetic construct
  source 1..141: mol_type = other RNA
gcagctctggatcctggtatgttttagagctagaaatagcaagttaaaataaggctagtccgttatcaacttgaaaaagtggcaccgagtcggtgcagaaaccaaatacagctcccaataccaggatccctgggatcctgg

SEQ ID NO: 6239 - RNA, 142 nt, synthetic construct
  source 1..142: mol_type = other RNA
gcagctctggatcctggtatgttttagagctagaaatagcaagttaaaataaggctagtccgttatcaacttgaaaaagtggcaccgagtcggtgcagaaaccaaatacagctcccaataccaggatccttcagggatcctg

SEQ ID NO: 6240 - RNA, 142 nt, synthetic construct
  source 1..142: mol_type = other RNA
gcagctctggatcctggtatgttttagagctagaaatagcaagttaaaataaggctagtccgttatcaacttgaaaaagtggcaccgagtcggtgcagaaaccaaatacagctcccaataccaggatccttaagggatcctg

SEQ ID NO: 6241 - RNA, 129 nt, synthetic construct
  source 1..129: mol_type = other RNA
gcagctctggatcctggtatgttttagagctagaaatagcaagttaaaataaggctagtccgttatcaacttgaaaaagtggcaccgagtcggtgcgaaaccaaatacagctcccaataccaggatcca

SEQ ID NO: 6242 - RNA, 134 nt, synthetic construct
  source 1..134: mol_type = other RNA
gcagctctggatcctggtatgttttagagctagaaatagcaagttaaaataaggctagtccgttatcaacttgaaaaagtggcaccgagtcggtgcgaaaccaaatacagctcccaataccaggatccatggtt

SEQ ID NO: 6243 - RNA, 139 nt, synthetic construct
  source 1..139: mol_type = other RNA
gcagctctggatcctggtatgttttagagctagaaatagcaagttaaaataaggctagtccgttatcaacttgaaaaagtggcaccgagtcggtgcgaaaccaaatacagctcccaataccaggatccactagtaggtt

SEQ ID NO: 6244 - RNA, 134 nt, synthetic construct
  source 1..134: mol_type = other RNA
gcagctctggatcctggtatgttttagagctagaaatagcaagttaaaataaggctagtccgttatcaacttgaaaaagtggcaccgagtcggtgcgaaaccaaatacagctcccaataccaggatccattggt

SEQ ID NO: 6245 - RNA, 139 nt, synthetic construct
  source 1..139: mol_type = other RNA
gcagctctggatcctggtatgttttagagctagaaatagcaagttaaaataaggctagtccgttatcaacttgaaaaagtggcaccgagtcggtgcgaaaccaaatacagctcccaataccaggatccaatcttgtggt

SEQ ID NO: 6246 - RNA, 139 nt, synthetic construct
  source 1..139: mol_type = other RNA
gcagctctggatcctggtatgttttagagctagaaatagcaagttaaaataaggctagtccgttatcaacttgaaaaagtggcaccgagtcggtgcgaaaccaaatacagctcccaataccaggatccatctctattgg

SEQ ID NO: 6247 - RNA, 139 nt, synthetic construct
  source 1..139: mol_type = other RNA
gcagctctggatcctggtatgttttagagctagaaatagcaagttaaaataaggctagtccgttatcaacttgaaaaagtggcaccgagtcggtgcgaaaccaaatacagctcccaataccaggatccaactctattgg

SEQ ID NO: 6248 - RNA, 139 nt, synthetic construct
  source 1..139: mol_type = other RNA
gcagctctggatcctggtatgttttagagctagaaatagcaagttaaaataaggctagtccgttatcaacttgaaaaagtggcaccgagtcggtgcgaaaccaaatacagctcccaataccaggatccaaggacttatt

SEQ ID NO: 6249 - RNA, 139 nt, synthetic construct
  source 1..139: mol_type = other RNA
gcagctctggatcctggtatgttttagagctagaaatagcaagttaaaataaggctagtccgttatcaacttgaaaaagtggcaccgagtcggtgcgaaaccaaatacagctcccaataccaggatccacggacttatt

SEQ ID NO: 6250 - RNA, 139 nt, synthetic construct
  source 1..139: mol_type = other RNA
gcagctctggatcctggtatgttttagagctagaaatagcaagttaaaataaggctagtccgttatcaacttgaaaaagtggcaccgagtcggtgcgaaaccaaatacagctcccaataccaggatccatcggtagtat

SEQ ID NO: 6251 - RNA, 138 nt, synthetic construct
  source 1..138: mol_type = other RNA
gcagctctggatcctggtatgttttagagctagaaatagcaagttaaaataaggctagtccgttatcaacttgaaaaagtggcaccgagtcggtgcgaaaccaaatacagctcccaataccaggatccatggacgtat

SEQ ID NO: 6252 - RNA, 139 nt, synthetic construct
  source 1..139: mol_type = other RNA
gcagctctggatcctggtatgttttagagctagaaatagcaagttaaaataaggctagtccgttatcaacttgaaaaagtggcaccgagtcggtgcgaaaccaaatacagctcccaataccaggatccaacttattgta

SEQ ID NO: 6253 - RNA, 139 nt, synthetic construct
  source 1..139: mol_type = other RNA
gcagctctggatcctggtatgttttagagctagaaatagcaagttaaaataaggctagtccgttatcaacttgaaaaagtggcaccgagtcggtgcgaaaccaaatacagctcccaataccaggatccaacatattgta

SEQ ID NO: 6254 - RNA, 139 nt, synthetic construct
  source 1..139: mol_type = other RNA
gcagctctggatcctggtatgttttagagctagaaatagcaagttaaaataaggctagtccgttatcaacttgaaaaagtggcaccgagtcggtgcgaaaccaaatacagctcccaataccaggatccacccgtactgt

SEQ ID NO: 6255 - RNA, 138 nt, synthetic construct
  source 1..138: mol_type = other RNA
gcagctctggatcctggtatgttttagagctagaaatagcaagttaaaataaggctagtccgttatcaacttgaaaaagtggcaccgagtcggtgcgaaaccaaatacagctcccaataccaggatccaagcctctgt

SEQ ID NO: 6256 - RNA, 139 nt, synthetic construct
  source 1..139: mol_type = other RNA
gcagctctggatcctggtatgttttagagctagaaatagcaagttaaaataaggctagtccgttatcaacttgaaaaagtggcaccgagtcggtgcgaaaccaaatacagctcccaataccaggatccatctgaagctg

SEQ ID NO: 6257 - RNA, 139 nt, synthetic construct
  source 1..139: mol_type = other RNA
gcagctctggatcctggtatgttttagagctagaaatagcaagttaaaataaggctagtccgttatcaacttgaaaaagtggcaccgagtcggtgcgaaaccaaatacagctcccaataccaggatccaatgacagctg

SEQ ID NO: 6258 - RNA, 138 nt, synthetic construct
  source 1..138: mol_type = other RNA
gcagctctggatcctggtatgttttagagctagaaatagcaagttaaaataaggctagtccgttatcaacttgaaaaagtggcaccgagtcggtgcgaaaccaaatacagctcccaataccaggatccacgcccagct

SEQ ID NO: 6259 - RNA, 139 nt, synthetic construct
  source 1..139: mol_type = other RNA
gcagctctggatcctggtatgttttagagctagaaatagcaagttaaaataaggctagtccgttatcaacttgaaaaagtggcaccgagtcggtgcgaaaccaaatacagctcccaataccaggatccatgatgtagct

SEQ ID NO: 6260 - RNA, 139 nt, synthetic construct
  source 1..139: mol_type = other RNA
gcagctctggatcctggtatgttttagagctagaaatagcaagttaaaataaggctagtccgttatcaacttgaaaaagtggcaccgagtcggtgcgaaaccaaatacagctcccaataccaggatccactcatagagc

SEQ ID NO: 6261 - RNA, 139 nt, synthetic construct
  source 1..139: mol_type = other RNA
gcagctctggatcctggtatgttttagagctagaaatagcaagttaaaataaggctagtccgttatcaacttgaaaaagtggcaccgagtcggtgcgaaaccaaatacagctcccaataccaggatccactacgtgagc

SEQ ID NO: 6262 - RNA, 139 nt, synthetic construct
  source 1..139: mol_type = other RNA
gcagctctggatcctggtatgttttagagctagaaatagcaagttaaaataaggctagtccgttatcaacttgaaaaagtggcaccgagtcggtgcgaaaccaaatacagctcccaataccaggatccaatcattggag

SEQ ID NO: 6263 - RNA, 136 nt, synthetic construct
  source 1..136: mol_type = other RNA
gcagctctggatcctggtatgttttagagctagaaatagcaagttaaaataaggctagtccgttatcaacttgaaaaagtggcaccgagtcggtgcgaaaccaaatacagctcccaataccaggatccatctggag

SEQ ID NO: 6264 - RNA, 138 nt, synthetic construct
  source 1..138: mol_type = other RNA
gcagctctggatcctggtatgttttagagctagaaatagcaagttaaaataaggctagtccgttatcaacttgaaaaagtggcaccgagtcggtgcgaaaccaaatacagctcccaataccaggatccaatgatggga

SEQ ID NO: 6265 - RNA, 138 nt, synthetic construct
  source 1..138: mol_type = other RNA
gcagctctggatcctggtatgttttagagctagaaatagcaagttaaaataaggctagtccgttatcaacttgaaaaagtggcaccgagtcggtgcgaaaccaaatacagctcccaataccaggatccaccaatggga

SEQ ID NO: 6266 - RNA, 138 nt, synthetic construct
  source 1..138: mol_type = other RNA
gcagctctggatcctggtatgttttagagctagaaatagcaagttaaaataaggctagtccgttatcaacttgaaaaagtggcaccgagtcggtgcgaaaccaaatacagctcccaataccaggatccaccaattggg

SEQ ID NO: 6267 - RNA, 138 nt, synthetic construct
  source 1..138: mol_type = other RNA
gcagctctggatcctggtatgttttagagctagaaatagcaagttaaaataaggctagtccgttatcaacttgaaaaagtggcaccgagtcggtgcgaaaccaaatacagctcccaataccaggatccacgcattggg

SEQ ID NO: 6268 - RNA, 139 nt, synthetic construct
  source 1..139: mol_type = other RNA
gcagctctggatcctggtatgttttagagctagaaatagcaagttaaaataaggctagtccgttatcaacttgaaaaagtggcaccgagtcggtgcgaaaccaaatacagctcccaataccaggatccacccctattgg

SEQ ID NO: 6269 - RNA, 139 nt, synthetic construct
  source 1..139: mol_type = other RNA
gcagctctggatcctggtatgttttagagctagaaatagcaagttaaaataaggctagtccgttatcaacttgaaaaagtggcaccgagtcggtgcgaaaccaaatacagctcccaataccaggatccacccatattgg

SEQ ID NO: 6270 - RNA, 139 nt, synthetic construct
  source 1..139: mol_type = other RNA
gcagctctggatcctggtatgttttagagctagaaatagcaagttaaaataaggctagtccgttatcaacttgaaaaagtggcaccgagtcggtgcgaaaccaaatacagctcccaataccaggatccatgagatattg

SEQ ID NO: 6271 - RNA, 139 nt, synthetic construct
  source 1..139: mol_type = other RNA
gcagctctggatcctggtatgttttagagctagaaatagcaagttaaaataaggctagtccgttatcaacttgaaaaagtggcaccgagtcggtgcgaaaccaaatacagctcccaataccaggatccactcaatattg

SEQ ID NO: 6272 - RNA, 139 nt, synthetic construct
  source 1..139: mol_type = other RNA
gcagctctggatcctggtatgttttagagctagaaatagcaagttaaaataaggctagtccgttatcaacttgaaaaagtggcaccgagtcggtgcgaaaccaaatacagctcccaataccaggatccaccacagtatt

SEQ ID NO: 6273 - RNA, 139 nt, synthetic construct
  source 1..139: mol_type = other RNA
gcagctctggatcctggtatgttttagagctagaaatagcaagttaaaataaggctagtccgttatcaacttgaaaaagtggcaccgagtcggtgcgaaaccaaatacagctcccaataccaggatccaccatcgtatt

SEQ ID NO: 6274 - RNA, 138 nt, synthetic construct
  source 1..138: mol_type = other RNA
gcagctctggatcctggtatgttttagagctagaaatagcaagttaaaataaggctagtccgttatcaacttgaaaaagtggcaccgagtcggtgcgaaaccaaatacagctcccaataccaggatccatcaccgtat

SEQ ID NO: 6275 - RNA, 138 nt, synthetic construct
  source 1..138: mol_type = other RNA
gcagctctggatcctggtatgttttagagctagaaatagcaagttaaaataaggctagtccgttatcaacttgaaaaagtggcaccgagtcggtgcgaaaccaaatacagctcccaataccaggatccaataccgtat

SEQ ID NO: 6276 - RNA, 139 nt, synthetic construct
  source 1..139: mol_type = other RNA
gcagctctggatcctggtatgttttagagctagaaatagcaagttaaaataaggctagtccgttatcaacttgaaaaagtggcaccgagtcggtgcgaaaccaaatacagctcccaataccaggatccaaggtacggta

SEQ ID NO: 6277 - RNA, 138 nt, synthetic construct
  source 1..138: mol_type = other RNA
gcagctctggatcctggtatgttttagagctagaaatagcaagttaaaataaggctagtccgttatcaacttgaaaaagtggcaccgagtcggtgcgaaaccaaatacagctcccaataccaggatccaatatcggta

SEQ ID NO: 6278 - RNA, 135 nt, synthetic construct
  source 1..135: mol_type = other RNA
gcagctctggatcctggtatgttttagagctagaaatagcaagttaaaataaggctagtccgttatcaacttgaaaaagtggcaccgagtcggtgcgaaaccaaatacagctcccaataccaggatccaactggt

SEQ ID NO: 6279 - RNA, 139 nt, synthetic construct
  source 1..139: mol_type = other RNA
gcagctctggatcctggtatgttttagagctagaaatagcaagttaaaataaggctagtccgttatcaacttgaaaaagtggcaccgagtcggtgcgaaaccaaatacagctcccaataccaggatccaagagtctggt

SEQ ID NO: 6280 - RNA, 139 nt, synthetic construct
  source 1..139: mol_type = other RNA
gcagctctggatcctggtatgttttagagctagaaatagcaagttaaaataaggctagtccgttatcaacttgaaaaagtggcaccgagtcggtgcgaaaccaaatacagctcccaataccaggatccatcccctctgg

SEQ ID NO: 6281 - RNA, 139 nt, synthetic construct
  source 1..139: mol_type = other RNA
gcagctctggatcctggtatgttttagagctagaaatagcaagttaaaataaggctagtccgttatcaacttgaaaaagtggcaccgagtcggtgcgaaaccaaatacagctcccaataccaggatccacgacctctgg

SEQ ID NO: 6282 - RNA, 137 nt, synthetic construct
  source 1..137: mol_type = other RNA
gcagctctggatcctggtatgttttagagctagaaatagcaagttaaaataaggctagtccgttatcaacttgaaaaagtggcaccgagtcggtgcgaaaccaaatacagctcccaataccaggatccaatggcctg

SEQ ID NO: 6283 - RNA, 137 nt, synthetic construct
  source 1..137: mol_type = other RNA
gcagctctggatcctggtatgttttagagctagaaatagcaagttaaaataaggctagtccgttatcaacttgaaaaagtggcaccgagtcggtgcgaaaccaaatacagctcccaataccaggatccaccggcctg

SEQ ID NO: 6284 - RNA, 138 nt, synthetic construct
  source 1..138: mol_type = other RNA
gcagctctggatcctggtatgttttagagctagaaatagcaagttaaaataaggctagtccgttatcaacttgaaaaagtggcaccgagtcggtgcgaaaccaaatacagctcccaataccaggatccactatatcct

SEQ ID NO: 6285 - RNA, 138 nt, synthetic construct
  source 1..138: mol_type = other RNA
gcagctctggatcctggtatgttttagagctagaaatagcaagttaaaataaggctagtccgttatcaacttgaaaaagtggcaccgagtcggtgcgaaaccaaatacagctcccaataccaggatccatgctatcct

SEQ ID NO: 6286 - RNA, 135 nt, synthetic construct
  source 1..135: mol_type = other RNA
gcagctctggatcctggtatgttttagagctagaaatagcaagttaaaataaggctagtccgttatcaacttgaaaaagtggcaccgagtcggtgcgaaaccaaatacagctcccaataccaggatccacgatcc

SEQ ID NO: 6287 - RNA, 135 nt, synthetic construct
  source 1..135: mol_type = other RNA
gcagctctggatcctggtatgttttagagctagaaatagcaagttaaaataaggctagtccgttatcaacttgaaaaagtggcaccgagtcggtgcgaaaccaaatacagctcccaataccaggatccatgatcc

SEQ ID NO: 6288 - RNA, 136 nt, synthetic construct
  source 1..136: mol_type = other RNA
gcagctctggatcctggtatgttttagagctagaaatagcaagttaaaataaggctagtccgttatcaacttgaaaaagtggcaccgagtcggtgcgaaaccaaatacagctcccaataccaggatccaacggatc

SEQ ID NO: 6289 - RNA, 137 nt, synthetic construct
  source 1..137: mol_type = other RNA
gcagctctggatcctggtatgttttagagctagaaatagcaagttaaaataaggctagtccgttatcaacttgaaaaagtggcaccgagtcggtgcgaaaccaaatacagctcccaataccaggatccaacgggatc

SEQ ID NO: 6290 - RNA, 139 nt, synthetic construct
  source 1..139: mol_type = other RNA
gcagctctggatcctggtatgttttagagctagaaatagcaagttaaaataaggctagtccgttatcaacttgaaaaagtggcaccgagtcggtgcgaaaccaaatacagctcccaataccaggatccacttcggggat

SEQ ID NO: 6291 - RNA, 139 nt, synthetic construct
  source 1..139: mol_type = other RNA
gcagctctggatcctggtatgttttagagctagaaatagcaagttaaaataaggctagtccgttatcaacttgaaaaagtggcaccgagtcggtgcgaaaccaaatacagctcccaataccaggatccactcaggggat

SEQ ID NO: 6292 - RNA, 138 nt, synthetic construct
  source 1..138: mol_type = other RNA
gcagctctggatcctggtatgttttagagctagaaatagcaagttaaaataaggctagtccgttatcaacttgaaaaagtggcaccgagtcggtgcgaaaccaaatacagctcccaataccaggatccaagccttgga

SEQ ID NO: 6293 - RNA, 138 nt, synthetic construct
  source 1..138: mol_type = other RNA
gcagctctggatcctggtatgttttagagctagaaatagcaagttaaaataaggctagtccgttatcaacttgaaaaagtggcaccgagtcggtgcgaaaccaaatacagctcccaataccaggatccaacagttgga

SEQ ID NO: 6294 - RNA, 141 nt, synthetic construct
  source 1..141: mol_type = other RNA
gcagctctggatcctggtatgttttagagctagaaatagcaagttaaaataaggctagtccgttatcaacttgaaaaagtggcaccgagtcggtgcgaaaccaaatacagctcccaataccaggatccatctctattggtt

SEQ ID NO: 6295 - RNA, 141 nt, synthetic construct
  source 1..141: mol_type = other RNA
gcagctctggatcctggtatgttttagagctagaaatagcaagttaaaataaggctagtccgttatcaacttgaaaaagtggcaccgagtcggtgcgaaaccaaatacagctcccaataccaggatccaactctattggtt

SEQ ID NO: 6296 - RNA, 141 nt, synthetic construct
  source 1..141: mol_type = other RNA
gcagctctggatcctggtatgttttagagctagaaatagcaagttaaaataaggctagtccgttatcaacttgaaaaagtggcaccgagtcggtgcgaaaccaaatacagctcccaataccaggatccatcacattgtatt

SEQ ID NO: 6297 - RNA, 141 nt, synthetic construct
  source 1..141: mol_type = other RNA
gcagctctggatcctggtatgttttagagctagaaatagcaagttaaaataaggctagtccgttatcaacttgaaaaagtggcaccgagtcggtgcgaaaccaaatacagctcccaataccaggatccactaaattgtatt

SEQ ID NO: 6298 - RNA, 141 nt, synthetic construct
  source 1..141: mol_type = other RNA
gcagctctggatcctggtatgttttagagctagaaatagcaagttaaaataaggctagtccgttatcaacttgaaaaagtggcaccgagtcggtgcgaaaccaaatacagctcccaataccaggatccacccgtactgtat

SEQ ID NO: 6299 - RNA, 140 nt, synthetic construct
  source 1..140: mol_type = other RNA
gcagctctggatcctggtatgttttagagctagaaatagcaagttaaaataaggctagtccgttatcaacttgaaaaagtggcaccgagtcggtgcgaaaccaaatacagctcccaataccaggatccattcttctgtat

SEQ ID NO: 6300 - RNA, 141 nt, synthetic construct
  source 1..141: mol_type = other RNA
gcagctctggatcctggtatgttttagagctagaaatagcaagttaaaataaggctagtccgttatcaacttgaaaaagtggcaccgagtcggtgcgaaaccaaatacagctcccaataccaggatccatcgccggctgta

SEQ ID NO: 6301 - RNA, 141 nt, synthetic construct
  source 1..141: mol_type = other RNA
gcagctctggatcctggtatgttttagagctagaaatagcaagttaaaataaggctagtccgttatcaacttgaaaaagtggcaccgagtcggtgcgaaaccaaatacagctcccaataccaggatccatctgaagctgta

SEQ ID NO: 6302 - RNA, 141 nt, synthetic construct
  source 1..141: mol_type = other RNA
gcagctctggatcctggtatgttttagagctagaaatagcaagttaaaataaggctagtccgttatcaacttgaaaaagtggcaccgagtcggtgcgaaaccaaatacagctcccaataccaggatccatgagccagctgt

SEQ ID NO: 6303 - RNA, 141 nt, synthetic construct
  source 1..141: mol_type = other RNA
gcagctctggatcctggtatgttttagagctagaaatagcaagttaaaataaggctagtccgttatcaacttgaaaaagtggcaccgagtcggtgcgaaaccaaatacagctcccaataccaggatccattcgctagctgt

SEQ ID NO: 6304 - RNA, 141 nt, synthetic construct
  source 1..141: mol_type = other RNA
gcagctctggatcctggtatgttttagagctagaaatagcaagttaaaataaggctagtccgttatcaacttgaaaaagtggcaccgagtcggtgcgaaaccaaatacagctcccaataccaggatccaatcgtagagctg

SEQ ID NO: 6305 - RNA, 141 nt, synthetic construct
  source 1..141: mol_type = other RNA
gcagctctggatcctggtatgttttagagctagaaatagcaagttaaaataaggctagtccgttatcaacttgaaaaagtggcaccgagtcggtgcgaaaccaaatacagctcccaataccaggatccactaagtgagctg

SEQ ID NO: 6306 - RNA, 141 nt, synthetic construct
  source 1..141: mol_type = other RNA
gcagctctggatcctggtatgttttagagctagaaatagcaagttaaaataaggctagtccgttatcaacttgaaaaagtggcaccgagtcggtgcgaaaccaaatacagctcccaataccaggatccaagctctggagct

SEQ ID NO: 6307 - RNA, 141 nt, synthetic construct
  source 1..141: mol_type = other RNA
gcagctctggatcctggtatgttttagagctagaaatagcaagttaaaataaggctagtccgttatcaacttgaaaaagtggcaccgagtcggtgcgaaaccaaatacagctcccaataccaggatccatgcgatggagct

SEQ ID NO: 6308 - RNA, 141 nt, synthetic construct
  source 1..141: mol_type = other RNA
gcagctctggatcctggtatgttttagagctagaaatagcaagttaaaataaggctagtccgttatcaacttgaaaaagtggcaccgagtcggtgcgaaaccaaatacagctcccaataccaggatccaatctcggggagc

SEQ ID NO: 6309 - RNA, 141 nt, synthetic construct
  source 1..141: mol_type = other RNA
gcagctctggatcctggtatgttttagagctagaaatagcaagttaaaataaggctagtccgttatcaacttgaaaaagtggcaccgagtcggtgcgaaaccaaatacagctcccaataccaggatccaatagtggggagc

SEQ ID NO: 6310 - RNA, 141 nt, synthetic construct
  source 1..141: mol_type = other RNA
gcagctctggatcctggtatgttttagagctagaaatagcaagttaaaataaggctagtccgttatcaacttgaaaaagtggcaccgagtcggtgcgaaaccaaatacagctcccaataccaggatccattattgtgggag

SEQ ID NO: 6311 - RNA, 141 nt, synthetic construct
  source 1..141: mol_type = other RNA
gcagctctggatcctggtatgttttagagctagaaatagcaagttaaaataaggctagtccgttatcaacttgaaaaagtggcaccgagtcggtgcgaaaccaaatacagctcccaataccaggatccaacattgtgggag

SEQ ID NO: 6312 - RNA, 141 nt, synthetic construct
  source 1..141: mol_type = other RNA
gcagctctggatcctggtatgttttagagctagaaatagcaagttaaaataaggctagtccgttatcaacttgaaaaagtggcaccgagtcggtgcgaaaccaaatacagctcccaataccaggatccaattacattggga

SEQ ID NO: 6313 - RNA, 141 nt, synthetic construct
  source 1..141: mol_type = other RNA
gcagctctggatcctggtatgttttagagctagaaatagcaagttaaaataaggctagtccgttatcaacttgaaaaagtggcaccgagtcggtgcgaaaccaaatacagctcccaataccaggatccaagcacattggga

SEQ ID NO: 6314 - RNA, 138 nt, synthetic construct
  source 1..138: mol_type = other RNA
gcagctctggatcctggtatgttttagagctagaaatagcaagttaaaataaggctagtccgttatcaacttgaaaaagtggcaccgagtcggtgcgaaaccaaatacagctcccaataccaggatccaccgattggg

SEQ ID NO: 6315 - RNA, 137 nt, synthetic construct
  source 1..137: mol_type = other RNA
gcagctctggatcctggtatgttttagagctagaaatagcaagttaaaataaggctagtccgttatcaacttgaaaaagtggcaccgagtcggtgcgaaaccaaatacagctcccaataccaggatccaccattggg

SEQ ID NO: 6316 - RNA, 141 nt, synthetic construct
  source 1..141: mol_type = other RNA
gcagctctggatcctggtatgttttagagctagaaatagcaagttaaaataaggctagtccgttatcaacttgaaaaagtggcaccgagtcggtgcgaaaccaaatacagctcccaataccaggatccaatcacttattgg

SEQ ID NO: 6317 - RNA, 141 nt, synthetic construct
  source 1..141: mol_type = other RNA
gcagctctggatcctggtatgttttagagctagaaatagcaagttaaaataaggctagtccgttatcaacttgaaaaagtggcaccgagtcggtgcgaaaccaaatacagctcccaataccaggatccattcacttattgg

SEQ ID NO: 6318 - RNA, 140 nt, synthetic construct
  source 1..140: mol_type = other RNA
gcagctctggatcctggtatgttttagagctagaaatagcaagttaaaataaggctagtccgttatcaacttgaaaaagtggcaccgagtcggtgcgaaaccaaatacagctcccaataccaggatccaatatcgtattg

SEQ ID NO: 6319 - RNA, 140 nt, synthetic construct
  source 1..140: mol_type = other RNA
gcagctctggatcctggtatgttttagagctagaaatagcaagttaaaataaggctagtccgttatcaacttgaaaaagtggcaccgagtcggtgcgaaaccaaatacagctcccaataccaggatccattatcgtattg

SEQ ID NO: 6320 - RNA, 141 nt, synthetic construct
  source 1..141: mol_type = other RNA
gcagctctggatcctggtatgttttagagctagaaatagcaagttaaaataaggctagtccgttatcaacttgaaaaagtggcaccgagtcggtgcgaaaccaaatacagctcccaataccaggatccaaggtacggtatt

SEQ ID NO: 6321 - RNA, 140 nt, synthetic construct
  source 1..140: mol_type = other RNA
gcagctctggatcctggtatgttttagagctagaaatagcaagttaaaataaggctagtccgttatcaacttgaaaaagtggcaccgagtcggtgcgaaaccaaatacagctcccaataccaggatccattatcggtatt

SEQ ID NO: 6322 - RNA, 140 nt, synthetic construct
  source 1..140: mol_type = other RNA
gcagctctggatcctggtatgttttagagctagaaatagcaagttaaaataaggctagtccgttatcaacttgaaaaagtggcaccgagtcggtgcgaaaccaaatacagctcccaataccaggatccaacggatggtat

SEQ ID NO: 6323 - RNA, 139 nt, synthetic construct
  source 1..139: mol_type = other RNA
gcagctctggatcctggtatgttttagagctagaaatagcaagttaaaataaggctagtccgttatcaacttgaaaaagtggcaccgagtcggtgcgaaaccaaatacagctcccaataccaggatccaaggatggtat

SEQ ID NO: 6324 - RNA, 141 nt, synthetic construct
  source 1..141: mol_type = other RNA
gcagctctggatcctggtatgttttagagctagaaatagcaagttaaaataaggctagtccgttatcaacttgaaaaagtggcaccgagtcggtgcgaaaccaaatacagctcccaataccaggatccacggcatctggta

SEQ ID NO: 6325 - RNA, 141 nt, synthetic construct
  source 1..141: mol_type = other RNA
gcagctctggatcctggtatgttttagagctagaaatagcaagttaaaataaggctagtccgttatcaacttgaaaaagtggcaccgagtcggtgcgaaaccaaatacagctcccaataccaggatccacccagtctggta

SEQ ID NO: 6326 - RNA, 139 nt, synthetic construct
  source 1..139: mol_type = other RNA
gcagctctggatcctggtatgttttagagctagaaatagcaagttaaaataaggctagtccgttatcaacttgaaaaagtggcaccgagtcggtgcgaaaccaaatacagctcccaataccaggatccaatggcctggt

SEQ ID NO: 6327 - RNA, 139 nt, synthetic construct
  source 1..139: mol_type = other RNA
gcagctctggatcctggtatgttttagagctagaaatagcaagttaaaataaggctagtccgttatcaacttgaaaaagtggcaccgagtcggtgcgaaaccaaatacagctcccaataccaggatccattggcctggt

SEQ ID NO: 6328 - RNA, 140 nt, synthetic construct
  source 1..140: mol_type = other RNA
gcagctctggatcctggtatgttttagagctagaaatagcaagttaaaataaggctagtccgttatcaacttgaaaaagtggcaccgagtcggtgcgaaaccaaatacagctcccaataccaggatccaccttatcctgg

SEQ ID NO: 6329 - RNA, 140 nt, synthetic construct
  source 1..140: mol_type = other RNA
gcagctctggatcctggtatgttttagagctagaaatagcaagttaaaataaggctagtccgttatcaacttgaaaaagtggcaccgagtcggtgcgaaaccaaatacagctcccaataccaggatccattatatcctgg

SEQ ID NO: 6330 - RNA, 137 nt, synthetic construct
  source 1..137: mol_type = other RNA
gcagctctggatcctggtatgttttagagctagaaatagcaagttaaaataaggctagtccgttatcaacttgaaaaagtggcaccgagtcggtgcgaaaccaaatacagctcccaataccaggatccaagatcctg

SEQ ID NO: 6331 - RNA, 137 nt, synthetic construct
  source 1..137: mol_type = other RNA
gcagctctggatcctggtatgttttagagctagaaatagcaagttaaaataaggctagtccgttatcaacttgaaaaagtggcaccgagtcggtgcgaaaccaaatacagctcccaataccaggatccacgatcctg

SEQ ID NO: 6332 - RNA, 138 nt, synthetic construct
  source 1..138: mol_type = other RNA
gcagctctggatcctggtatgttttagagctagaaatagcaagttaaaataaggctagtccgttatcaacttgaaaaagtggcaccgagtcggtgcgaaaccaaatacagctcccaataccaggatccaacggatcct

SEQ ID NO: 6333 - RNA, 139 nt, synthetic construct
  source 1..139: mol_type = other RNA
gcagctctggatcctggtatgttttagagctagaaatagcaagttaaaataaggctagtccgttatcaacttgaaaaagtggcaccgagtcggtgcgaaaccaaatacagctcccaataccaggatccaacgggatcct

SEQ ID NO: 6334 - RNA, 141 nt, synthetic construct
  source 1..141: mol_type = other RNA
gcagctctggatcctggtatgttttagagctagaaatagcaagttaaaataaggctagtccgttatcaacttgaaaaagtggcaccgagtcggtgcgaaaccaaatacagctcccaataccaggatccacttcggggatcc

SEQ ID NO: 6335 - RNA, 141 nt, synthetic construct
  source 1..141: mol_type = other RNA
gcagctctggatcctggtatgttttagagctagaaatagcaagttaaaataaggctagtccgttatcaacttgaaaaagtggcaccgagtcggtgcgaaaccaaatacagctcccaataccaggatccactcaggggatcc

SEQ ID NO: 6336 - RNA, 140 nt, synthetic construct
  source 1..140: mol_type = other RNA
gcagctctggatcctggtatgttttagagctagaaatagcaagttaaaataaggctagtccgttatcaacttgaaaaagtggcaccgagtcggtgcgaaaccaaatacagctcccaataccaggatccaagtgttggatc

SEQ ID NO: 6337 - RNA, 140 nt, synthetic construct
  source 1..140: mol_type = other RNA
gcagctctggatcctggtatgttttagagctagaaatagcaagttaaaataaggctagtccgttatcaacttgaaaaagtggcaccgagtcggtgcgaaaccaaatacagctcccaataccaggatccaagtcttggatc

SEQ ID NO: 6338 - RNA, 143 nt, synthetic construct
  source 1..143: mol_type = other RNA
gcagctctggatcctggtatgttttagagctagaaatagcaagttaaaataaggctagtccgttatcaacttgaaaaagtggcaccgagtcggtgcgaaaccaaatacagctcccaataccaggatccatctgtagctgtatt

SEQ ID NO: 6339 - RNA, 143 nt, synthetic construct
  source 1..143: mol_type = other RNA
gcagctctggatcctggtatgttttagagctagaaatagcaagttaaaataaggctagtccgttatcaacttgaaaaagtggcaccgagtcggtgcgaaaccaaatacagctcccaataccaggatccaacgccagctgtatt

SEQ ID NO: 6340 - RNA, 143 nt, synthetic construct
  source 1..143: mol_type = other RNA
gcagctctggatcctggtatgttttagagctagaaatagcaagttaaaataaggctagtccgttatcaacttgaaaaagtggcaccgagtcggtgcgaaaccaaatacagctcccaataccaggatccattctctagctgtat

SEQ ID NO: 6341 - RNA, 142 nt, synthetic construct
  source 1..142: mol_type = other RNA
gcagctctggatcctggtatgttttagagctagaaatagcaagttaaaataaggctagtccgttatcaacttgaaaaagtggcaccgagtcggtgcgaaaccaaatacagctcccaataccaggatccacgagtagctgtat

SEQ ID NO: 6342 - RNA, 143 nt, synthetic construct
  source 1..143: mol_type = other RNA
gcagctctggatcctggtatgttttagagctagaaatagcaagttaaaataaggctagtccgttatcaacttgaaaaagtggcaccgagtcggtgcgaaaccaaatacagctcccaataccaggatccaatcgtagagctgta

SEQ ID NO: 6343 - RNA, 143 nt, synthetic construct
  source 1..143: mol_type = other RNA
gcagctctggatcctggtatgttttagagctagaaatagcaagttaaaataaggctagtccgttatcaacttgaaaaagtggcaccgagtcggtgcgaaaccaaatacagctcccaataccaggatccactcatagagctgta

SEQ ID NO: 6344 - RNA, 143 nt, synthetic construct
  source 1..143: mol_type = other RNA
gcagctctggatcctggtatgttttagagctagaaatagcaagttaaaataaggctagtccgttatcaacttgaaaaagtggcaccgagtcggtgcgaaaccaaatacagctcccaataccaggatccatgcgatggagctgt

SEQ ID NO: 6345 - RNA, 143 nt, synthetic construct
  source 1..143: mol_type = other RNA
gcagctctggatcctggtatgttttagagctagaaatagcaagttaaaataaggctagtccgttatcaacttgaaaaagtggcaccgagtcggtgcgaaaccaaatacagctcccaataccaggatccacgctctggagctgt

SEQ ID NO: 6346 - RNA, 143 nt, synthetic construct
  source 1..143: mol_type = other RNA
gcagctctggatcctggtatgttttagagctagaaatagcaagttaaaataaggctagtccgttatcaacttgaaaaagtggcaccgagtcggtgcgaaaccaaatacagctcccaataccaggatccaatagtggggagctg

SEQ ID NO: 6347 - RNA, 143 nt, synthetic construct
  source 1..143: mol_type = other RNA
gcagctctggatcctggtatgttttagagctagaaatagcaagttaaaataaggctagtccgttatcaacttgaaaaagtggcaccgagtcggtgcgaaaccaaatacagctcccaataccaggatccaatctcggggagctg

SEQ ID NO: 6348 - RNA, 143 nt, synthetic construct
  source 1..143: mol_type = other RNA
gcagctctggatcctggtatgttttagagctagaaatagcaagttaaaataaggctagtccgttatcaacttgaaaaagtggcaccgagtcggtgcgaaaccaaatacagctcccaataccaggatccaagattgtgggagct

SEQ ID NO: 6349 - RNA, 143 nt, synthetic construct
  source 1..143: mol_type = other RNA
gcagctctggatcctggtatgttttagagctagaaatagcaagttaaaataaggctagtccgttatcaacttgaaaaagtggcaccgagtcggtgcgaaaccaaatacagctcccaataccaggatccaacattgtgggagct

SEQ ID NO: 6350 - RNA, 143 nt, synthetic construct
  source 1..143: mol_type = other RNA
gcagctctggatcctggtatgttttagagctagaaatagcaagttaaaataaggctagtccgttatcaacttgaaaaagtggcaccgagtcggtgcgaaaccaaatacagctcccaataccaggatccaatagcattgggagc

SEQ ID NO: 6351 - RNA, 143 nt, synthetic construct
  source 1..143: mol_type = other RNA
gcagctctggatcctggtatgttttagagctagaaatagcaagttaaaataaggctagtccgttatcaacttgaaaaagtggcaccgagtcggtgcgaaaccaaatacagctcccaataccaggatccaatatcattgggagc

SEQ ID NO: 6352 - RNA, 142 nt, synthetic construct
  source 1..142: mol_type = other RNA
gcagctctggatcctggtatgttttagagctagaaatagcaagttaaaataaggctagtccgttatcaacttgaaaaagtggcaccgagtcggtgcgaaaccaaatacagctcccaataccaggatccaacatcattgggag

SEQ ID NO: 6353 - RNA, 143 nt, synthetic construct
  source 1..143: mol_type = other RNA
gcagctctggatcctggtatgttttagagctagaaatagcaagttaaaataaggctagtccgttatcaacttgaaaaagtggcaccgagtcggtgcgaaaccaaatacagctcccaataccaggatccaagttagattgggag

SEQ ID NO: 6354 - RNA, 143 nt, synthetic construct
  source 1..143: mol_type = other RNA
gcagctctggatcctggtatgttttagagctagaaatagcaagttaaaataaggctagtccgttatcaacttgaaaaagtggcaccgagtcggtgcgaaaccaaatacagctcccaataccaggatccatgagattattggga

SEQ ID NO: 6355 - RNA, 143 nt, synthetic construct
  source 1..143: mol_type = other RNA
gcagctctggatcctggtatgttttagagctagaaatagcaagttaaaataaggctagtccgttatcaacttgaaaaagtggcaccgagtcggtgcgaaaccaaatacagctcccaataccaggatccaacagattattggga

SEQ ID NO: 6356 - RNA, 142 nt, synthetic construct
  source 1..142: mol_type = other RNA
gcagctctggatcctggtatgttttagagctagaaatagcaagttaaaataaggctagtccgttatcaacttgaaaaagtggcaccgagtcggtgcgaaaccaaatacagctcccaataccaggatccaaggacgtattggg

SEQ ID NO: 6357 - RNA, 141 nt, synthetic construct
  source 1..141: mol_type = other RNA
gcagctctggatcctggtatgttttagagctagaaatagcaagttaaaataaggctagtccgttatcaacttgaaaaagtggcaccgagtcggtgcgaaaccaaatacagctcccaataccaggatccaaggagtattggg

SEQ ID NO: 6358 - RNA, 143 nt, synthetic construct
  source 1..143: mol_type = other RNA
gcagctctggatcctggtatgttttagagctagaaatagcaagttaaaataaggctagtccgttatcaacttgaaaaagtggcaccgagtcggtgcgaaaccaaatacagctcccaataccaggatccacggtacggtattgg

SEQ ID NO: 6359 - RNA, 143 nt, synthetic construct
  source 1..143: mol_type = other RNA
gcagctctggatcctggtatgttttagagctagaaatagcaagttaaaataaggctagtccgttatcaacttgaaaaagtggcaccgagtcggtgcgaaaccaaatacagctcccaataccaggatccaaggtacggtattgg

SEQ ID NO: 6360 - RNA, 142 nt, synthetic construct
  source 1..142: mol_type = other RNA
gcagctctggatcctggtatgttttagagctagaaatagcaagttaaaataaggctagtccgttatcaacttgaaaaagtggcaccgagtcggtgcgaaaccaaatacagctcccaataccaggatccaacggatggtattg

SEQ ID NO: 6361 - RNA, 141 nt, synthetic construct
  source 1..141: mol_type = other RNA
gcagctctggatcctggtatgttttagagctagaaatagcaagttaaaataaggctagtccgttatcaacttgaaaaagtggcaccgagtcggtgcgaaaccaaatacagctcccaataccaggatccaaggatggtattg

SEQ ID NO: 6362 - RNA, 143 nt, synthetic construct
  source 1..143: mol_type = other RNA
gcagctctggatcctggtatgttttagagctagaaatagcaagttaaaataaggctagtccgttatcaacttgaaaaagtggcaccgagtcggtgcgaaaccaaatacagctcccaataccaggatccacggcatctggtatt

SEQ ID NO: 6363 - RNA, 143 nt, synthetic construct
  source 1..143: mol_type = other RNA
gcagctctggatcctggtatgttttagagctagaaatagcaagttaaaataaggctagtccgttatcaacttgaaaaagtggcaccgagtcggtgcgaaaccaaatacagctcccaataccaggatccaacaagtctggtatt

SEQ ID NO: 6364 - RNA, 141 nt, synthetic construct
  source 1..141: mol_type = other RNA
gcagctctggatcctggtatgttttagagctagaaatagcaagttaaaataaggctagtccgttatcaacttgaaaaagtggcaccgagtcggtgcgaaaccaaatacagctcccaataccaggatccactggcctggtat

SEQ ID NO: 6365 - RNA, 141 nt, synthetic construct
  source 1..141: mol_type = other RNA
gcagctctggatcctggtatgttttagagctagaaatagcaagttaaaataaggctagtccgttatcaacttgaaaaagtggcaccgagtcggtgcgaaaccaaatacagctcccaataccaggatccattggcctggtat

SEQ ID NO: 6366 - RNA, 142 nt, synthetic construct
  source 1..142: mol_type = other RNA
gcagctctggatcctggtatgttttagagctagaaatagcaagttaaaataaggctagtccgttatcaacttgaaaaagtggcaccgagtcggtgcgaaaccaaatacagctcccaataccaggatccattatatcctggta

SEQ ID NO: 6367 - RNA, 142 nt, synthetic construct
  source 1..142: mol_type = other RNA
gcagctctggatcctggtatgttttagagctagaaatagcaagttaaaataaggctagtccgttatcaacttgaaaaagtggcaccgagtcggtgcgaaaccaaatacagctcccaataccaggatccaagatatcctggta

SEQ ID NO: 6368 - RNA, 139 nt, synthetic construct
  source 1..139: mol_type = other RNA
gcagctctggatcctggtatgttttagagctagaaatagcaagttaaaataaggctagtccgttatcaacttgaaaaagtggcaccgagtcggtgcgaaaccaaatacagctcccaataccaggatccacgatcctggt

SEQ ID NO: 6369 - RNA, 139 nt, synthetic construct
  source 1..139: mol_type = other RNA
gcagctctggatcctggtatgttttagagctagaaatagcaagttaaaataaggctagtccgttatcaacttgaaaaagtggcaccgagtcggtgcgaaaccaaatacagctcccaataccaggatccaagatcctggt

SEQ ID NO: 6370 - RNA, 140 nt, synthetic construct
  source 1..140: mol_type = other RNA
gcagctctggatcctggtatgttttagagctagaaatagcaagttaaaataaggctagtccgttatcaacttgaaaaagtggcaccgagtcggtgcgaaaccaaatacagctcccaataccaggatccaacggatcctgg

SEQ ID NO: 6371 - RNA, 141 nt, synthetic construct
  source 1..141: mol_type = other RNA
gcagctctggatcctggtatgttttagagctagaaatagcaagttaaaataaggctagtccgttatcaacttgaaaaagtggcaccgagtcggtgcgaaaccaaatacagctcccaataccaggatccaacgggatcctgg

SEQ ID NO: 6372 - RNA, 143 nt, synthetic construct
  source 1..143: mol_type = other RNA
gcagctctggatcctggtatgttttagagctagaaatagcaagttaaaataaggctagtccgttatcaacttgaaaaagtggcaccgagtcggtgcgaaaccaaatacagctcccaataccaggatccacctaggggatcctg

SEQ ID NO: 6373 - RNA, 143 nt, synthetic construct
  source 1..143: mol_type = other RNA
gcagctctggatcctggtatgttttagagctagaaatagcaagttaaaataaggctagtccgttatcaacttgaaaaagtggcaccgagtcggtgcgaaaccaaatacagctcccaataccaggatccacttcggggatcctg

SEQ ID NO: 6374 - RNA, 142 nt, synthetic construct
  source 1..142: mol_type = other RNA
gcagctctggatcctggtatgttttagagctagaaatagcaagttaaaataaggctagtccgttatcaacttgaaaaagtggcaccgagtcggtgcgaaaccaaatacagctcccaataccaggatccaacgcttggatcct

SEQ ID NO: 6375 - RNA, 142 nt, synthetic construct
  source 1..142: mol_type = other RNA
gcagctctggatcctggtatgttttagagctagaaatagcaagttaaaataaggctagtccgttatcaacttgaaaaagtggcaccgagtcggtgcgaaaccaaatacagctcccaataccaggatccaagtattggatcct

SEQ ID NO: 6376 - RNA, 54 nt, synthetic construct
  source 1..54: mol_type = other RNA
gtttaagagctagaaatagcaagtttaaataaggctagtccgttatcagcgtga

SEQ ID NO: 6377 - RNA, 22 nt, synthetic construct
  source 1..22: mol_type = other RNA
aaacgcggcaccgagtcggtgc

SEQ ID NO: 6378 - RNA, 52 nt, synthetic construct
  source 1..52: mol_type = other RNA
gtttaagagctagaaatagcaagtttaaataaggctagtccgttatcagcgt

SEQ ID NO: 6379 - RNA, 53 nt, synthetic construct
  source 1..53: mol_type = other RNA
gtttaagagctagaaatagcaagtttaaataaggctagtccgttatcagcgtt

SEQ ID NO: 6380 - RNA, 53 nt, synthetic construct
  source 1..53: mol_type = other RNA
gtttaagagctagaaatagcaagtttaaataaggctagtccgttatcagcgta

SEQ ID NO: 6381 - RNA, 53 nt, synthetic construct
  source 1..53: mol_type = other RNA
gtttaagagctagaaatagcaagtttaaataaggctagtccgttatcagcgtc

SEQ ID NO: 6382 - RNA, 53 nt, synthetic construct
  source 1..53: mol_type = other RNA
gtttaagagctagaaatagcaagtttaaataaggctagtccgttatcagcgtg

SEQ ID NO: 6383 - RNA, 54 nt, synthetic construct
  source 1..54: mol_type = other RNA
gtttaagagctagaaatagcaagtttaaataaggctagtccgttatcagcgtgg

SEQ ID NO: 6384 - RNA, 54 nt, synthetic construct
  source 1..54: mol_type = other RNA
gtttaagagctagaaatagcaagtttaaataaggctagtccgttatcagcgtct

SEQ ID NO: 6385 - RNA, 54 nt, synthetic construct
  source 1..54: mol_type = other RNA
gtttaagagctagaaatagcaagtttaaataaggctagtccgttatcagcgtcg

SEQ ID NO: 6386 - RNA, 54 nt, synthetic construct
  source 1..54: mol_type = other RNA
gtttaagagctagaaatagcaagtttaaataaggctagtccgttatcagcgtgc

SEQ ID NO: 6387 - RNA, 54 nt, synthetic construct
  source 1..54: mol_type = other RNA
gtttaagagctagaaatagcaagtttaaataaggctagtccgttatcagcgtag

SEQ ID NO: 6388 - RNA, 54 nt, synthetic construct
  source 1..54: mol_type = other RNA
gtttaagagctagaaatagcaagtttaaataaggctagtccgttatcagcgttc

SEQ ID NO: 6389 - RNA, 54 nt, synthetic construct
  source 1..54: mol_type = other RNA
gtttaagagctagaaatagcaagtttaaataaggctagtccgttatcagcgtca

SEQ ID NO: 6390 - RNA, 54 nt, synthetic construct
  source 1..54: mol_type = other RNA
gtttaagagctagaaatagcaagtttaaataaggctagtccgttatcagcgtac

SEQ ID NO: 6391 - RNA, 54 nt, synthetic construct
  source 1..54: mol_type = other RNA
gtttaagagctagaaatagcaagtttaaataaggctagtccgttatcagcgtgt

SEQ ID NO: 6392 - RNA, 54 nt, synthetic construct
  source 1..54: mol_type = other RNA
gtttaagagctagaaatagcaagtttaaataaggctagtccgttatcagcgtaa

SEQ ID NO: 6393 - RNA, 54 nt, synthetic construct
  source 1..54: mol_type = other RNA
gtttaagagctagaaatagcaagtttaaataaggctagtccgttatcagcgttg

SEQ ID NO: 6394 - RNA, 54 nt, synthetic construct
  source 1..54: mol_type = other RNA
gtttaagagctagaaatagcaagtttaaataaggctagtccgttatcagcgtta

SEQ ID NO: 6395 - RNA, 54 nt, synthetic construct
  source 1..54: mol_type = other RNA
gtttaagagctagaaatagcaagtttaaataaggctagtccgttatcagcgtcc

SEQ ID NO: 6396 - RNA, 54 nt, synthetic construct
  source 1..54: mol_type = other RNA
gtttaagagctagaaatagcaagtttaaataaggctagtccgttatcagcgtat

SEQ ID NO: 6397 - RNA, 55 nt, synthetic construct
  source 1..55: mol_type = other RNA
gtttaagagctagaaatagcaagtttaaataaggctagtccgttatcagcgtcat

SEQ ID NO: 6398 - RNA, 55 nt, synthetic construct
  source 1..55: mol_type = other RNA
gtttaagagctagaaatagcaagtttaaataaggctagtccgttatcagcgtggg

SEQ ID NO: 6399 - RNA, 55 nt, synthetic construct
  source 1..55: mol_type = other RNA
gtttaagagctagaaatagcaagtttaaataaggctagtccgttatcagcgtgac

SEQ ID NO: 6400 - RNA, 55 nt, synthetic construct
  source 1..55: mol_type = other RNA
gtttaagagctagaaatagcaagtttaaataaggctagtccgttatcagcgtggc

SEQ ID NO: 6401 - RNA, 55 nt, synthetic construct
  source 1..55: mol_type = other RNA
gtttaagagctagaaatagcaagtttaaataaggctagtccgttatcagcgtgta

SEQ ID NO: 6402 - RNA, 55 nt, synthetic construct
  source 1..55: mol_type = other RNA
gtttaagagctagaaatagcaagtttaaataaggctagtccgttatcagcgtcgt

SEQ ID NO: 6403 - RNA, 55 nt, synthetic construct
  source 1..55: mol_type = other RNA
gtttaagagctagaaatagcaagtttaaataaggctagtccgttatcagcgttac

SEQ ID NO: 6404 - RNA, 55 nt, synthetic construct
  source 1..55: mol_type = other RNA
gtttaagagctagaaatagcaagtttaaataaggctagtccgttatcagcgtgtt

SEQ ID NO: 6405 - RNA, 55 nt, synthetic construct
  source 1..55: mol_type = other RNA
gtttaagagctagaaatagcaagtttaaataaggctagtccgttatcagcgttaa

SEQ ID NO: 6406 - RNA, 55 nt, synthetic construct
  source 1..55: mol_type = other RNA
gtttaagagctagaaatagcaagtttaaataaggctagtccgttatcagcgtctc

SEQ ID NO: 6407 - RNA, 55 nt, synthetic construct
  source 1..55: mol_type = other RNA
gtttaagagctagaaatagcaagtttaaataaggctagtccgttatcagcgtcta

SEQ ID NO: 6408 - RNA, 55 nt, synthetic construct
  source 1..55: mol_type = other RNA
gtttaagagctagaaatagcaagtttaaataaggctagtccgttatcagcgtccc

SEQ ID NO: 6409 - RNA, 55 nt, synthetic construct
  source 1..55: mol_type = other RNA
gtttaagagctagaaatagcaagtttaaataaggctagtccgttatcagcgtcaa

SEQ ID NO: 6410 - RNA, 55 nt, synthetic construct
  source 1..55: mol_type = other RNA
gtttaagagctagaaatagcaagtttaaataaggctagtccgttatcagcgtagg

SEQ ID NO: 6411 - RNA, 55 nt, synthetic construct
  source 1..55: mol_type = other RNA
gtttaagagctagaaatagcaagtttaaataaggctagtccgttatcagcgtcct

SEQ ID NO: 6412 - RNA, 55 nt, synthetic construct
  source 1..55: mol_type = other RNA
gtttaagagctagaaatagcaagtttaaataaggctagtccgttatcagcgttcc

SEQ ID NO: 6413 - RNA, 55 nt, synthetic construct
  source 1..55: mol_type = other RNA
gtttaagagctagaaatagcaagtttaaataaggctagtccgttatcagcgtggt

SEQ ID NO: 6414 - RNA, 55 nt, synthetic construct
  source 1..55: mol_type = other RNA
gtttaagagctagaaatagcaagtttaaataaggctagtccgttatcagcgtgag

SEQ ID NO: 6415 - RNA, 55 nt, synthetic construct
  source 1..55: mol_type = other RNA
gtttaagagctagaaatagcaagtttaaataaggctagtccgttatcagcgtgcc

SEQ ID NO: 6416 - RNA, 55 nt, synthetic construct
  source 1..55: mol_type = other RNA
gtttaagagctagaaatagcaagtttaaataaggctagtccgttatcagcgtaag

SEQ ID NO: 6417 - RNA, 55 nt, synthetic construct
  source 1..55: mol_type = other RNA
gtttaagagctagaaatagcaagtttaaataaggctagtccgttatcagcgttgg

SEQ ID NO: 6418 - RNA, 55 nt, synthetic construct
  source 1..55: mol_type = other RNA
gtttaagagctagaaatagcaagtttaaataaggctagtccgttatcagcgtcac

SEQ ID NO: 6419 - RNA, 55 nt, synthetic construct
  source 1..55: mol_type = other RNA
gtttaagagctagaaatagcaagtttaaataaggctagtccgttatcagcgtact

SEQ ID NO: 6420 - RNA, 55 nt, synthetic construct
  source 1..55: mol_type = other RNA
gtttaagagctagaaatagcaagtttaaataaggctagtccgttatcagcgtacc

SEQ ID NO: 6421 - RNA, 55 nt, synthetic construct
  source 1..55: mol_type = other RNA
gtttaagagctagaaatagcaagtttaaataaggctagtccgttatcagcgtttg

SEQ ID NO: 6422 - RNA, 55 nt, synthetic construct
  source 1..55: mol_type = other RNA
gtttaagagctagaaatagcaagtttaaataaggctagtccgttatcagcgttca

SEQ ID NO: 6423 - RNA, 55 nt, synthetic construct
  source 1..55: mol_type = other RNA
gtttaagagctagaaatagcaagtttaaataaggctagtccgttatcagcgtgca

SEQ ID NO: 6424 - RNA, 55 nt, synthetic construct
  source 1..55: mol_type = other RNA
gtttaagagctagaaatagcaagtttaaataaggctagtccgttatcagcgtgct

SEQ ID NO: 6425 - RNA, 55 nt, synthetic construct
  source 1..55: mol_type = other RNA
gtttaagagctagaaatagcaagtttaaataaggctagtccgttatcagcgtaca

SEQ ID NO: 6426 - RNA, 55 nt, synthetic construct
  source 1..55: mol_type = other RNA
gtttaagagctagaaatagcaagtttaaataaggctagtccgttatcagcgtctg

SEQ ID NO: 6427 - RNA, 55 nt, synthetic construct
  source 1..55: mol_type = other RNA
gtttaagagctagaaatagcaagtttaaataaggctagtccgttatcagcgttcg

SEQ ID NO: 6428 - RNA, 55 nt, synthetic construct
  source 1..55: mol_type = other RNA
gtttaagagctagaaatagcaagtttaaataaggctagtccgttatcagcgtagt

SEQ ID NO: 6429 - RNA, 55 nt, synthetic construct
  source 1..55: mol_type = other RNA
gtttaagagctagaaatagcaagtttaaataaggctagtccgttatcagcgttga

SEQ ID NO: 6430 - RNA, 55 nt, synthetic construct
  source 1..55: mol_type = other RNA
gtttaagagctagaaatagcaagtttaaataaggctagtccgttatcagcgtagc

SEQ ID NO: 6431 - RNA, 55 nt, synthetic construct
  source 1..55: mol_type = other RNA
gtttaagagctagaaatagcaagtttaaataaggctagtccgttatcagcgttct

SEQ ID NO: 6432 - RNA, 55 nt, synthetic construct
  source 1..55: mol_type = other RNA
gtttaagagctagaaatagcaagtttaaataaggctagtccgttatcagcgtatc

SEQ ID NO: 6433 - RNA, 55 nt, synthetic construct
  source 1..55: mol_type = other RNA
gtttaagagctagaaatagcaagtttaaataaggctagtccgttatcagcgtaga

SEQ ID NO: 6434 - RNA, 55 nt, synthetic construct
  source 1..55: mol_type = other RNA
gtttaagagctagaaatagcaagtttaaataaggctagtccgttatcagcgttgc

SEQ ID NO: 6435 - RNA, 55 nt, synthetic construct
  source 1..55: mol_type = other RNA
gtttaagagctagaaatagcaagtttaaataaggctagtccgttatcagcgtcca

SEQ ID NO: 6436 - RNA, 55 nt, synthetic construct
  source 1..55: mol_type = other RNA
gtttaagagctagaaatagcaagtttaaataaggctagtccgttatcagcgtttc

SEQ ID NO: 6437 - RNA, 55 nt, synthetic construct
  source 1..55: mol_type = other RNA
gtttaagagctagaaatagcaagtttaaataaggctagtccgttatcagcgtgcg

SEQ ID NO: 6438 - RNA, 55 nt, synthetic construct
  source 1..55: mol_type = other RNA
gtttaagagctagaaatagcaagtttaaataaggctagtccgttatcagcgtttt

SEQ ID NO: 6439 - RNA, 55 nt, synthetic construct
  source 1..55: mol_type = other RNA
gtttaagagctagaaatagcaagtttaaataaggctagtccgttatcagcgtatg

SEQ ID NO: 6440 - RNA, 56 nt, synthetic construct
  source 1..56: mol_type = other RNA
gtttaagagctagaaatagcaagtttaaataaggctagtccgttatcagcgttcgt

SEQ ID NO: 6441 - RNA, 56 nt, synthetic construct
  source 1..56: mol_type = other RNA
gtttaagagctagaaatagcaagtttaaataaggctagtccgttatcagcgtggtg

SEQ ID NO: 6442 - RNA, 56 nt, synthetic construct
  source 1..56: mol_type = other RNA
gtttaagagctagaaatagcaagtttaaataaggctagtccgttatcagcgtggca

SEQ ID NO: 6443 - RNA, 56 nt, synthetic construct
  source 1..56: mol_type = other RNA
gtttaagagctagaaatagcaagtttaaataaggctagtccgttatcagcgtctaa

SEQ ID NO: 6444 - RNA, 56 nt, synthetic construct
  source 1..56: mol_type = other RNA
gtttaagagctagaaatagcaagtttaaataaggctagtccgttatcagcgtagac

SEQ ID NO: 6445 - RNA, 56 nt, synthetic construct
  source 1..56: mol_type = other RNA
gtttaagagctagaaatagcaagtttaaataaggctagtccgttatcagcgtcgct

SEQ ID NO: 6446 - RNA, 56 nt, synthetic construct
  source 1..56: mol_type = other RNA
gtttaagagctagaaatagcaagtttaaataaggctagtccgttatcagcgtacag

SEQ ID NO: 6447 - RNA, 56 nt, synthetic construct
  source 1..56: mol_type = other RNA
gtttaagagctagaaatagcaagtttaaataaggctagtccgttatcagcgttggc

SEQ ID NO: 6448 - RNA, 56 nt, synthetic construct
  source 1..56: mol_type = other RNA
gtttaagagctagaaatagcaagtttaaataaggctagtccgttatcagcgtgccc

SEQ ID NO: 6449 - RNA, 56 nt, synthetic construct
  source 1..56: mol_type = other RNA
gtttaagagctagaaatagcaagtttaaataaggctagtccgttatcagcgtccgg

SEQ ID NO: 6450 - RNA, 56 nt, synthetic construct
  source 1..56: mol_type = other RNA
gtttaagagctagaaatagcaagtttaaataaggctagtccgttatcagcgtcggc

SEQ ID NO: 6451 - RNA, 56 nt, synthetic construct
  source 1..56: mol_type = other RNA
gtttaagagctagaaatagcaagtttaaataaggctagtccgttatcagcgtgggg

SEQ ID NO: 6452 - RNA, 56 nt, synthetic construct
  source 1..56: mol_type = other RNA
gtttaagagctagaaatagcaagtttaaataaggctagtccgttatcagcgtgggt

SEQ ID NO: 6453 - RNA, 56 nt, synthetic construct
  source 1..56: mol_type = other RNA
gtttaagagctagaaatagcaagtttaaataaggctagtccgttatcagcgtcaac

SEQ ID NO: 6454 - RNA, 56 nt, synthetic construct
  source 1..56: mol_type = other RNA
gtttaagagctagaaatagcaagtttaaataaggctagtccgttatcagcgttgtg

SEQ ID NO: 6455 - RNA, 56 nt, synthetic construct
  source 1..56: mol_type = other RNA
gtttaagagctagaaatagcaagtttaaataaggctagtccgttatcagcgtcgtt

SEQ ID NO: 6456 - RNA, 56 nt, synthetic construct
  source 1..56: mol_type = other RNA
gtttaagagctagaaatagcaagtttaaataaggctagtccgttatcagcgtgctt

SEQ ID NO: 6457 - RNA, 56 nt, synthetic construct
  source 1..56: mol_type = other RNA
gtttaagagctagaaatagcaagtttaaataaggctagtccgttatcagcgtaacc

SEQ ID NO: 6458 - RNA, 56 nt, synthetic construct
  source 1..56: mol_type = other RNA
gtttaagagctagaaatagcaagtttaaataaggctagtccgttatcagcgtacac

SEQ ID NO: 6459 - RNA, 56 nt, synthetic construct
  source 1..56: mol_type = other RNA
gtttaagagctagaaatagcaagtttaaataaggctagtccgttatcagcgtgcgg

SEQ ID NO: 6460 - RNA, 56 nt, synthetic construct
  source 1..56: mol_type = other RNA
gtttaagagctagaaatagcaagtttaaataaggctagtccgttatcagcgttccg

SEQ ID NO: 6461 - RNA, 56 nt, synthetic construct
  source 1..56: mol_type = other RNA
gtttaagagctagaaatagcaagtttaaataaggctagtccgttatcagcgtcctg

SEQ ID NO: 6462 - RNA, 56 nt, synthetic construct
  source 1..56: mol_type = other RNA
gtttaagagctagaaatagcaagtttaaataaggctagtccgttatcagcgtcagg

SEQ ID NO: 6463 - RNA, 56 nt, synthetic construct
  source 1..56: mol_type = other RNA
gtttaagagctagaaatagcaagtttaaataaggctagtccgttatcagcgtttcc

SEQ ID NO: 6464 - RNA, 56 nt, synthetic construct
  source 1..56: mol_type = other RNA
gtttaagagctagaaatagcaagtttaaataaggctagtccgttatcagcgtgagt

SEQ ID NO: 6465 - RNA, 56 nt, synthetic construct
  source 1..56: mol_type = other RNA
gtttaagagctagaaatagcaagtttaaataaggctagtccgttatcagcgtccct

SEQ ID NO: 6466 - RNA, 56 nt, synthetic construct
  source 1..56: mol_type = other RNA
gtttaagagctagaaatagcaagtttaaataaggctagtccgttatcagcgtatca

SEQ ID NO: 6467 - RNA, 56 nt, synthetic construct
  source 1..56: mol_type = other RNA
gtttaagagctagaaatagcaagtttaaataaggctagtccgttatcagcgtgacg

SEQ ID NO: 6468 - RNA, 56 nt, synthetic construct
  source 1..56: mol_type = other RNA
gtttaagagctagaaatagcaagtttaaataaggctagtccgttatcagcgttcgc

SEQ ID NO: 6469 - RNA, 56 nt, synthetic construct
  source 1..56: mol_type = other RNA
gtttaagagctagaaatagcaagtttaaataaggctagtccgttatcagcgtcggg

SEQ ID NO: 6470 - RNA, 56 nt, synthetic construct
  source 1..56: mol_type = other RNA
gtttaagagctagaaatagcaagtttaaataaggctagtccgttatcagcgtgtac

SEQ ID NO: 6471 - RNA, 56 nt, synthetic construct
  source 1..56: mol_type = other RNA
gtttaagagctagaaatagcaagtttaaataaggctagtccgttatcagcgtccgc

SEQ ID NO: 6472 - RNA, 56 nt, synthetic construct
  source 1..56: mol_type = other RNA
gtttaagagctagaaatagcaagtttaaataaggctagtccgttatcagcgtgcga

SEQ ID NO: 6473 - RNA, 56 nt, synthetic construct
  source 1..56: mol_type = other RNA
gtttaagagctagaaatagcaagtttaaataaggctagtccgttatcagcgtgtgc

SEQ ID NO: 6474 - RNA, 56 nt, synthetic construct
  source 1..56: mol_type = other RNA
gtttaagagctagaaatagcaagtttaaataaggctagtccgttatcagcgtgcaa

SEQ ID NO: 6475 - RNA, 56 nt, synthetic construct
  source 1..56: mol_type = other RNA
gtttaagagctagaaatagcaagtttaaataaggctagtccgttatcagcgtccga

SEQ ID NO: 6476 - RNA, 56 nt, synthetic construct
  source 1..56: mol_type = other RNA
gtttaagagctagaaatagcaagtttaaataaggctagtccgttatcagcgtctgt

SEQ ID NO: 6477 - RNA, 56 nt, synthetic construct
  source 1..56: mol_type = other RNA
gtttaagagctagaaatagcaagtttaaataaggctagtccgttatcagcgtggga

SEQ ID NO: 6478 - RNA, 56 nt, synthetic construct
  source 1..56: mol_type = other RNA
gtttaagagctagaaatagcaagtttaaataaggctagtccgttatcagcgttacc

SEQ ID NO: 6479 - RNA, 56 nt, synthetic construct
  source 1..56: mol_type = other RNA
gtttaagagctagaaatagcaagtttaaataaggctagtccgttatcagcgtacct

SEQ ID NO: 6480 - RNA, 56 nt, synthetic construct
  source 1..56: mol_type = other RNA
gtttaagagctagaaatagcaagtttaaataaggctagtccgttatcagcgtctcg

SEQ ID NO: 6481 - RNA, 56 nt, synthetic construct
  source 1..56: mol_type = other RNA
gtttaagagctagaaatagcaagtttaaataaggctagtccgttatcagcgtctga

SEQ ID NO: 6482 - RNA, 56 nt, synthetic construct
  source 1..56: mol_type = other RNA
gtttaagagctagaaatagcaagtttaaataaggctagtccgttatcagcgtggcc

SEQ ID NO: 6483 - RNA, 56 nt, synthetic construct
  source 1..56: mol_type = other RNA
gtttaagagctagaaatagcaagtttaaataaggctagtccgttatcagcgtcgca

SEQ ID NO: 6484 - RNA, 56 nt, synthetic construct
  source 1..56: mol_type = other RNA
gtttaagagctagaaatagcaagtttaaataaggctagtccgttatcagcgttagc

SEQ ID NO: 6485 - RNA, 56 nt, synthetic construct
  source 1..56: mol_type = other RNA
gtttaagagctagaaatagcaagtttaaataaggctagtccgttatcagcgtcaag

SEQ ID NO: 6486 - RNA, 56 nt, synthetic construct
  source 1..56: mol_type = other RNA
gtttaagagctagaaatagcaagtttaaataaggctagtccgttatcagcgtccaa

SEQ ID NO: 6487 - RNA, 56 nt, synthetic construct
  source 1..56: mol_type = other RNA
gtttaagagctagaaatagcaagtttaaataaggctagtccgttatcagcgtgcac

SEQ ID NO: 6488 - RNA, 56 nt, synthetic construct
  source 1..56: mol_type = other RNA
gtttaagagctagaaatagcaagtttaaataaggctagtccgttatcagcgtcgtg

SEQ ID NO: 6489 - RNA, 56 nt, synthetic construct
  source 1..56: mol_type = other RNA
gtttaagagctagaaatagcaagtttaaataaggctagtccgttatcagcgtctgg

SEQ ID NO: 6490 - RNA, 56 nt, synthetic construct
  source 1..56: mol_type = other RNA
gtttaagagctagaaatagcaagtttaaataaggctagtccgttatcagcgttgtc

SEQ ID NO: 6491 - RNA, 56 nt, synthetic construct
  source 1..56: mol_type = other RNA
gtttaagagctagaaatagcaagtttaaataaggctagtccgttatcagcgtagat

SEQ ID NO: 6492 - RNA, 56 nt, synthetic construct
  source 1..56: mol_type = other RNA
gtttaagagctagaaatagcaagtttaaataaggctagtccgttatcagcgtactt

SEQ ID NO: 6493 - RNA, 56 nt, synthetic construct
  source 1..56: mol_type = other RNA
gtttaagagctagaaatagcaagtttaaataaggctagtccgttatcagcgtgatg

SEQ ID NO: 6494 - RNA, 56 nt, synthetic construct
  source 1..56: mol_type = other RNA
gtttaagagctagaaatagcaagtttaaataaggctagtccgttatcagcgtccat

SEQ ID NO: 6495 - RNA, 56 nt, synthetic construct
  source 1..56: mol_type = other RNA
gtttaagagctagaaatagcaagtttaaataaggctagtccgttatcagcgtgacc

SEQ ID NO: 6496 - RNA, 56 nt, synthetic construct
  source 1..56: mol_type = other RNA
gtttaagagctagaaatagcaagtttaaataaggctagtccgttatcagcgtcgga

SEQ ID NO: 6497 - RNA, 56 nt, synthetic construct
  source 1..56: mol_type = other RNA
gtttaagagctagaaatagcaagtttaaataaggctagtccgttatcagcgttgga

SEQ ID NO: 6498 - RNA, 56 nt, synthetic construct
  source 1..56: mol_type = other RNA
gtttaagagctagaaatagcaagtttaaataaggctagtccgttatcagcgtacgt

SEQ ID NO: 6499 - RNA, 56 nt, synthetic construct
  source 1..56: mol_type = other RNA
gtttaagagctagaaatagcaagtttaaataaggctagtccgttatcagcgtgtcg

SEQ ID NO: 6500 - RNA, 56 nt, synthetic construct
  source 1..56: mol_type = other RNA
gtttaagagctagaaatagcaagtttaaataaggctagtccgttatcagcgtgaag

SEQ ID NO: 6501 - RNA, 56 nt, synthetic construct
  source 1..56: mol_type = other RNA
gtttaagagctagaaatagcaagtttaaataaggctagtccgttatcagcgtaagc

SEQ ID NO: 6502 - RNA, 56 nt, synthetic construct
  source 1..56: mol_type = other RNA
gtttaagagctagaaatagcaagtttaaataaggctagtccgttatcagcgtgctg

SEQ ID NO: 6503 - RNA, 56 nt, synthetic construct
  source 1..56: mol_type = other RNA
gtttaagagctagaaatagcaagtttaaataaggctagtccgttatcagcgtggtc

SEQ ID NO: 6504 - RNA, 56 nt, synthetic construct
  source 1..56: mol_type = other RNA
gtttaagagctagaaatagcaagtttaaataaggctagtccgttatcagcgtagcc

SEQ ID NO: 6505 - RNA, 56 nt, synthetic construct
  source 1..56: mol_type = other RNA
gtttaagagctagaaatagcaagtttaaataaggctagtccgttatcagcgtcttc

SEQ ID NO: 6506 - RNA, 56 nt, synthetic construct
  source 1..56: mol_type = other RNA
gtttaagagctagaaatagcaagtttaaataaggctagtccgttatcagcgtctct

SEQ ID NO: 6507 - RNA, 56 nt, synthetic construct
  source 1..56: mol_type = other RNA
gtttaagagctagaaatagcaagtttaaataaggctagtccgttatcagcgtagta

SEQ ID NO: 6508 - RNA, 56 nt, synthetic construct
  source 1..56: mol_type = other RNA
gtttaagagctagaaatagcaagtttaaataaggctagtccgttatcagcgtgcgc

SEQ ID NO: 6509 - RNA, 57 nt, synthetic construct
  source 1..57: mol_type = other RNA
gtttaagagctagaaatagcaagtttaaataaggctagtccgttatcagcgttccca

SEQ ID NO: 6510 - RNA, 57 nt, synthetic construct
  source 1..57: mol_type = other RNA
gtttaagagctagaaatagcaagtttaaataaggctagtccgttatcagcgtcgtcc

SEQ ID NO: 6511 - RNA, 57 nt, synthetic construct
  source 1..57: mol_type = other RNA
gtttaagagctagaaatagcaagtttaaataaggctagtccgttatcagcgttgcag

SEQ ID NO: 6512 - RNA, 57 nt, synthetic construct
  source 1..57: mol_type = other RNA
gtttaagagctagaaatagcaagtttaaataaggctagtccgttatcagcgttcgcc

SEQ ID NO: 6513 - RNA, 57 nt, synthetic construct
  source 1..57: mol_type = other RNA
gtttaagagctagaaatagcaagtttaaataaggctagtccgttatcagcgttcggg

SEQ ID NO: 6514 - RNA, 57 nt, synthetic construct
  source 1..57: mol_type = other RNA
gtttaagagctagaaatagcaagtttaaataaggctagtccgttatcagcgttgcac

SEQ ID NO: 6515 - RNA, 57 nt, synthetic construct
  source 1..57: mol_type = other RNA
gtttaagagctagaaatagcaagtttaaataaggctagtccgttatcagcgtctcta

SEQ ID NO: 6516 - RNA, 57 nt, synthetic construct
  source 1..57: mol_type = other RNA
gtttaagagctagaaatagcaagtttaaataaggctagtccgttatcagcgtcgccg

SEQ ID NO: 6517 - RNA, 57 nt, synthetic construct
  source 1..57: mol_type = other RNA
gtttaagagctagaaatagcaagtttaaataaggctagtccgttatcagcgttacgg

SEQ ID NO: 6518 - RNA, 57 nt, synthetic construct
  source 1..57: mol_type = other RNA
gtttaagagctagaaatagcaagtttaaataaggctagtccgttatcagcgtagctg

SEQ ID NO: 6519 - RNA, 57 nt, synthetic construct
  source 1..57: mol_type = other RNA
gtttaagagctagaaatagcaagtttaaataaggctagtccgttatcagcgtactgg

SEQ ID NO: 6520 - RNA, 57 nt, synthetic construct
  source 1..57: mol_type = other RNA
gtttaagagctagaaatagcaagtttaaataaggctagtccgttatcagcgtcgctg

SEQ ID NO: 6521 - RNA, 57 nt, synthetic construct
  source 1..57: mol_type = other RNA
gtttaagagctagaaatagcaagtttaaataaggctagtccgttatcagcgtcctgt

SEQ ID NO: 6522 - RNA, 57 nt, synthetic construct
  source 1..57: mol_type = other RNA
gtttaagagctagaaatagcaagtttaaataaggctagtccgttatcagcgtatacc

SEQ ID NO: 6523 - RNA, 57 nt, synthetic construct
  source 1..57: mol_type = other RNA
gtttaagagctagaaatagcaagtttaaataaggctagtccgttatcagcgttaggt

SEQ ID NO: 6524 - RNA, 57 nt, synthetic construct
  source 1..57: mol_type = other RNA
gtttaagagctagaaatagcaagtttaaataaggctagtccgttatcagcgtgctga

SEQ ID NO: 6525 - RNA, 57 nt, synthetic construct
  source 1..57: mol_type = other RNA
gtttaagagctagaaatagcaagtttaaataaggctagtccgttatcagcgtacggc

SEQ ID NO: 6526 - RNA, 57 nt, synthetic construct
  source 1..57: mol_type = other RNA
gtttaagagctagaaatagcaagtttaaataaggctagtccgttatcagcgtgtgag

SEQ ID NO: 6527 - RNA, 57 nt, synthetic construct
  source 1..57: mol_type = other RNA
gtttaagagctagaaatagcaagtttaaataaggctagtccgttatcagcgtcggca

SEQ ID NO: 6528 - RNA, 57 nt, synthetic construct
  source 1..57: mol_type = other RNA
gtttaagagctagaaatagcaagtttaaataaggctagtccgttatcagcgtccgct

SEQ ID NO: 6529 - RNA, 57 nt, synthetic construct
  source 1..57: mol_type = other RNA
gtttaagagctagaaatagcaagtttaaataaggctagtccgttatcagcgtccacc

SEQ ID NO: 6530 - RNA, 57 nt, synthetic construct
  source 1..57: mol_type = other RNA
gtttaagagctagaaatagcaagtttaaataaggctagtccgttatcagcgtagtcc

SEQ ID NO: 6531 - RNA, 57 nt, synthetic construct
  source 1..57: mol_type = other RNA
gtttaagagctagaaatagcaagtttaaataaggctagtccgttatcagcgtcgcat

SEQ ID NO: 6532 - RNA, 57 nt, synthetic construct
  source 1..57: mol_type = other RNA
gtttaagagctagaaatagcaagtttaaataaggctagtccgttatcagcgtggtga

SEQ ID NO: 6533 - skipped

SEQ ID NO: 6534 - RNA, 10 nt, synthetic construct
  source 1..10: mol_type = other RNA
gtttaagagc

SEQ ID NO: 6535 - RNA, 11 nt, synthetic construct
  source 1..11: mol_type = other RNA
gtttaagagcc

SEQ ID NO: 6536 - RNA, 30 nt, synthetic construct
  source 1..30: mol_type = other RNA
ctcgaaagagacgcggcaccgagtcggtgc

SEQ ID NO: 6537 - RNA, 30 nt, synthetic construct
  source 1..30: mol_type = other RNA
gcagaaatgcacgcggcaccgagtcggtgc

SEQ ID NO: 6538 - RNA, 30 nt, synthetic construct
  source 1..30: mol_type = other RNA
cccgaaagggacgcggcaccgagtcggtgc

SEQ ID NO: 6539 - RNA, 30 nt, synthetic construct
  source 1..30: mol_type = other RNA
tgcgaaagcaacgcggcaccgagtcggtgc

SEQ ID NO: 6540 - RNA, 30 nt, synthetic construct
  source 1..30: mol_type = other RNA
cacgaaagtgacgcggcaccgagtcggtgc

SEQ ID NO: 6541 - RNA, 30 nt, synthetic construct
  source 1..30: mol_type = other RNA
ccagaaatggacgcggcaccgagtcggtgc

SEQ ID NO: 6542 - RNA, 30 nt, synthetic construct
  source 1..30: mol_type = other RNA
gctgaaaagcacgcggcaccgagtcggtgc

SEQ ID NO: 6543 - RNA, 30 nt, synthetic construct
  source 1..30: mol_type = other RNA
gtcgaaaggcacgcggcaccgagtcggtgc

SEQ ID NO: 6544 - RNA, 30 nt, synthetic construct
  source 1..30: mol_type = other RNA
cgggaaaccgacgcggcaccgagtcggtgc

SEQ ID NO: 6545 - RNA, 30 nt, synthetic construct
  source 1..30: mol_type = other RNA
caggaaactgacgcggcaccgagtcggtgc

SEQ ID NO: 6546 - RNA, 30 nt, synthetic construct
  source 1..30: mol_type = other RNA
tccgaaaggaacgcggcaccgagtcggtgc

SEQ ID NO: 6547 - RNA, 30 nt, synthetic construct
  source 1..30: mol_type = other RNA
ggggaaacccacgcggcaccgagtcggtgc

SEQ ID NO: 6548 - RNA, 30 nt, synthetic construct
  source 1..30: mol_type = other RNA
agcgaaagctacgcggcaccgagtcggtgc

SEQ ID NO: 6549 - RNA, 30 nt, synthetic construct
  source 1..30: mol_type = other RNA
gtggaaacacacgcggcaccgagtcggtgc

SEQ ID NO: 6550 - RNA, 30 nt, synthetic construct
  source 1..30: mol_type = other RNA
gccgaaaggcacgcggcaccgagtcggtgc

SEQ ID NO: 6551 - RNA, 30 nt, synthetic construct
  source 1..30: mol_type = other RNA
cgtgaaaacgacgcggcaccgagtcggtgc

SEQ ID NO: 6552 - RNA, 30 nt, synthetic construct
  source 1..30: mol_type = other RNA
accgaaaggtacgcggcaccgagtcggtgc

SEQ ID NO: 6553 - RNA, 30 nt, synthetic construct
  source 1..30: mol_type = other RNA
cctgaaaaggacgcggcaccgagtcggtgc

SEQ ID NO: 6554 - RNA, 30 nt, synthetic construct
  source 1..30: mol_type = other RNA
ccggaaacggacgcggcaccgagtcggtgc

SEQ ID NO: 6555 - RNA, 30 nt, synthetic construct
  source 1..30: mol_type = other RNA
acggaaacgtacgcggcaccgagtcggtgc

SEQ ID NO: 6556 - RNA, 30 nt, synthetic construct
  source 1..30: mol_type = other RNA
gcggaaacgcacgcggcaccgagtcggtgc

SEQ ID NO: 6557 - RNA, 30 nt, synthetic construct
  source 1..30: mol_type = other RNA
ctggaaacagacgcggcaccgagtcggtgc

SEQ ID NO: 6558 - RNA, 30 nt, synthetic construct
  source 1..30: mol_type = other RNA
ggggaaactcacgcggcaccgagtcggtgc

SEQ ID NO: 6559 - RNA, 30 nt, synthetic construct
  source 1..30: mol_type = other RNA
ccggaaatggacgcggcaccgagtcggtgc

SEQ ID NO: 6560 - RNA, 30 nt, synthetic construct
  source 1..30: mol_type = other RNA
cgtgaaagcgacgcggcaccgagtcggtgc

SEQ ID NO: 6561 - RNA, 31 nt, synthetic construct
  source 1..31: mol_type = other RNA
gtggaaacacaacgcggcaccgagtcggtgc

SEQ ID NO: 6562 - RNA, 31 nt, synthetic construct
  source 1..31: mol_type = other RNA
caggaaactgtacgcggcaccgagtcggtgc

SEQ ID NO: 6563 - RNA, 31 nt, synthetic construct
  source 1..31: mol_type = other RNA
gaagaaattcgacgcggcaccgagtcggtgc

SEQ ID NO: 6564 - RNA, 31 nt, synthetic construct
  source 1..31: mol_type = other RNA
accgaaaggtaacgcggcaccgagtcggtgc

SEQ ID NO: 6565 - RNA, 31 nt, synthetic construct
  source 1..31: mol_type = other RNA
ccggaaacggcacgcggcaccgagtcggtgc

SEQ ID NO: 6566 - RNA, 31 nt, synthetic construct
  source 1..31: mol_type = other RNA
aacgaaagttgacgcggcaccgagtcggtgc

SEQ ID NO: 6567 - RNA, 31 nt, synthetic construct
  source 1..31: mol_type = other RNA
ggcgaaagctaacgcggcaccgagtcggtgc

SEQ ID NO: 6568 - RNA, 31 nt, synthetic construct
  source 1..31: mol_type = other RNA
agcgaaagctaacgcggcaccgagtcggtgc

SEQ ID NO: 6569 - RNA, 31 nt, synthetic construct
  source 1..31: mol_type = other RNA
gtcgaaagaccacgcggcaccgagtcggtgc

SEQ ID NO: 6570 - RNA, 31 nt, synthetic construct
  source 1..31: mol_type = other RNA
cgcgaaagcgtacgcggcaccgagtcggtgc

SEQ ID NO: 6571 - RNA, 31 nt, synthetic construct
  source 1..31: mol_type = other RNA
gtggaaacatcacgcggcaccgagtcggtgc

SEQ ID NO: 6572 - RNA, 31 nt, synthetic construct
  source 1..31: mol_type = other RNA
gtggaaacacgacgcggcaccgagtcggtgc

SEQ ID NO: 6573 - RNA, 31 nt, synthetic construct
  source 1..31: mol_type = other RNA
actgaaaagtcacgcggcaccgagtcggtgc

SEQ ID NO: 6574 - RNA, 31 nt, synthetic construct
  source 1..31: mol_type = other RNA
gcagaaatgctacgcggcaccgagtcggtgc

SEQ ID NO: 6575 - RNA, 31 nt, synthetic construct
  source 1..31: mol_type = other RNA
tgcgaaagcagacgcggcaccgagtcggtgc

SEQ ID NO: 6576 - RNA, 31 nt, synthetic construct
  source 1..31: mol_type = other RNA
ttcgaaagaggacgcggcaccgagtcggtgc

SEQ ID NO: 6577 - RNA, 31 nt, synthetic construct
  source 1..31: mol_type = other RNA
ggggaaacctgacgcggcaccgagtcggtgc

SEQ ID NO: 6578 - RNA, 31 nt, synthetic construct
  source 1..31: mol_type = other RNA
gcggaaacgctacgcggcaccgagtcggtgc

SEQ ID NO: 6579 - RNA, 31 nt, synthetic construct
  source 1..31: mol_type = other RNA
accgaaaggtgacgcggcaccgagtcggtgc

SEQ ID NO: 6580 - RNA, 31 nt, synthetic construct
  source 1..31: mol_type = other RNA
gcggaaacgccacgcggcaccgagtcggtgc

SEQ ID NO: 6581 - RNA, 31 nt, synthetic construct
  source 1..31: mol_type = other RNA
tacgaaagtagacgcggcaccgagtcggtgc

SEQ ID NO: 6582 - RNA, 31 nt, synthetic construct
  source 1..31: mol_type = other RNA
cctgaaaaggcacgcggcaccgagtcggtgc

SEQ ID NO: 6583 - RNA, 31 nt, synthetic construct
  source 1..31: mol_type = other RNA
tgcgaaagcacacgcggcaccgagtcggtgc

SEQ ID NO: 6584 - RNA, 31 nt, synthetic construct
  source 1..31: mol_type = other RNA
tgagaaatcacacgcggcaccgagtcggtgc

SEQ ID NO: 6585 - RNA, 31 nt, synthetic construct
  source 1..31: mol_type = other RNA
caggaaactgcacgcggcaccgagtcggtgc

SEQ ID NO: 6586 - RNA, 31 nt, synthetic construct
  source 1..31: mol_type = other RNA
ctcgaaagagaacgcggcaccgagtcggtgc

SEQ ID NO: 6587 - RNA, 31 nt, synthetic construct
  source 1..31: mol_type = other RNA
cccgaaagggcacgcggcaccgagtcggtgc

SEQ ID NO: 6588 - RNA, 31 nt, synthetic construct
  source 1..31: mol_type = other RNA
accgaaaggttacgcggcaccgagtcggtgc

SEQ ID NO: 6589 - RNA, 31 nt, synthetic construct
  source 1..31: mol_type = other RNA
ctggaaacagtacgcggcaccgagtcggtgc

SEQ ID NO: 6590 - RNA, 31 nt, synthetic construct
  source 1..31: mol_type = other RNA
ggcgaaagccgacgcggcaccgagtcggtgc

SEQ ID NO: 6591 - RNA, 31 nt, synthetic construct
  source 1..31: mol_type = other RNA
gccgaaaggctacgcggcaccgagtcggtgc

SEQ ID NO: 6592 - RNA, 31 nt, synthetic construct
  source 1..31: mol_type = other RNA
acagaaatgtcacgcggcaccgagtcggtgc

SEQ ID NO: 6593 - RNA, 31 nt, synthetic construct
  source 1..31: mol_type = other RNA
gtcgaaagacgacgcggcaccgagtcggtgc

SEQ ID NO: 6594 - RNA, 31 nt, synthetic construct
  source 1..31: mol_type = other RNA
cacgaaagtggacgcggcaccgagtcggtgc

SEQ ID NO: 6595 - RNA, 31 nt, synthetic construct
  source 1..31: mol_type = other RNA
acggaaacgtcacgcggcaccgagtcggtgc

SEQ ID NO: 6596 - RNA, 31 nt, synthetic construct
  source 1..31: mol_type = other RNA
gtggaaacaccacgcggcaccgagtcggtgc

SEQ ID NO: 6597 - RNA, 31 nt, synthetic construct
  source 1..31: mol_type = other RNA
aaggaaacttcacgcggcaccgagtcggtgc

SEQ ID NO: 6598 - RNA, 31 nt, synthetic construct
  source 1..31: mol_type = other RNA
cccgaaaggggacgcggcaccgagtcggtgc

SEQ ID NO: 6599 - RNA, 31 nt, synthetic construct
  source 1..31: mol_type = other RNA
tgtgaaaacgcacgcggcaccgagtcggtgc

SEQ ID NO: 6600 - RNA, 31 nt, synthetic construct
  source 1..31: mol_type = other RNA
cgggaaaccgcacgcggcaccgagtcggtgc

SEQ ID NO: 6601 - RNA, 31 nt, synthetic construct
  source 1..31: mol_type = other RNA
gaggaaactcaacgcggcaccgagtcggtgc

SEQ ID NO: 6602 - RNA, 31 nt, synthetic construct
  source 1..31: mol_type = other RNA
cgggaaaccgtacgcggcaccgagtcggtgc

SEQ ID NO: 6603 - RNA, 31 nt, synthetic construct
  source 1..31: mol_type = other RNA
gacgaaagtctacgcggcaccgagtcggtgc

SEQ ID NO: 6604 - RNA, 31 nt, synthetic construct
  source 1..31: mol_type = other RNA
ttcgaaagaagacgcggcaccgagtcggtgc

SEQ ID NO: 6605 - RNA, 31 nt, synthetic construct
  source 1..31: mol_type = other RNA
tgggaaaccatacgcggcaccgagtcggtgc

SEQ ID NO: 6606 - RNA, 31 nt, synthetic construct
  source 1..31: mol_type = other RNA
tgggaaaccacacgcggcaccgagtcggtgc

SEQ ID NO: 6607 - RNA, 31 nt, synthetic construct
  source 1..31: mol_type = other RNA
agggaaaccttacgcggcaccgagtcggtgc

SEQ ID NO: 6608 - RNA, 31 nt, synthetic construct
  source 1..31: mol_type = other RNA
agcgaaagctgacgcggcaccgagtcggtgc

SEQ ID NO: 6609 - RNA, 31 nt, synthetic construct
  source 1..31: mol_type = other RNA
cacgaaagtgtacgcggcaccgagtcggtgc

SEQ ID NO: 6610 - RNA, 31 nt, synthetic construct
  source 1..31: mol_type = other RNA
gtcgaaaggcgacgcggcaccgagtcggtgc

SEQ ID NO: 6611 - RNA, 31 nt, synthetic construct
  source 1..31: mol_type = other RNA
gccgaaaggcaacgcggcaccgagtcggtgc

SEQ ID NO: 6612 - RNA, 31 nt, synthetic construct
  source 1..31: mol_type = other RNA
ggagaaatccaacgcggcaccgagtcggtgc

SEQ ID NO: 6613 - RNA, 31 nt, synthetic construct
  source 1..31: mol_type = other RNA
ctcgaaagagtacgcggcaccgagtcggtgc

SEQ ID NO: 6614 - RNA, 31 nt, synthetic construct
  source 1..31: mol_type = other RNA
cgtgaaaacgtacgcggcaccgagtcggtgc

SEQ ID NO: 6615 - RNA, 31 nt, synthetic construct
  source 1..31: mol_type = other RNA
acggaaacgttacgcggcaccgagtcggtgc

SEQ ID NO: 6616 - RNA, 31 nt, synthetic construct
  source 1..31: mol_type = other RNA
atcgaaaggtgacgcggcaccgagtcggtgc

SEQ ID NO: 6617 - RNA, 31 nt, synthetic construct
  source 1..31: mol_type = other RNA
tgggaaaccagacgcggcaccgagtcggtgc

SEQ ID NO: 6618 - RNA, 31 nt, synthetic construct
  source 1..31: mol_type = other RNA
aaggaaacttgacgcggcaccgagtcggtgc

SEQ ID NO: 6619 - RNA, 31 nt, synthetic construct
  source 1..31: mol_type = other RNA
ggtgaaagccaacgcggcaccgagtcggtgc

SEQ ID NO: 6620 - RNA, 31 nt, synthetic construct
  source 1..31: mol_type = other RNA
cgagaaatcggacgcggcaccgagtcggtgc

SEQ ID NO: 6621 - RNA, 31 nt, synthetic construct
  source 1..31: mol_type = other RNA
ggtgaaaacccacgcggcaccgagtcggtgc

SEQ ID NO: 6622 - RNA, 31 nt, synthetic construct
  source 1..31: mol_type = other RNA
atcgaaagatcacgcggcaccgagtcggtgc

SEQ ID NO: 6623 - RNA, 31 nt, synthetic construct
  source 1..31: mol_type = other RNA
gcggaaacgcaacgcggcaccgagtcggtgc

SEQ ID NO: 6624 - RNA, 31 nt, synthetic construct
  source 1..31: mol_type = other RNA
tcggaaacgagacgcggcaccgagtcggtgc

SEQ ID NO: 6625 - RNA, 31 nt, synthetic construct
  source 1..31: mol_type = other RNA
tcagaaatggcacgcggcaccgagtcggtgc

SEQ ID NO: 6626 - RNA, 31 nt, synthetic construct
  source 1..31: mol_type = other RNA
gccgaaaggtaacgcggcaccgagtcggtgc

SEQ ID NO: 6627 - RNA, 31 nt, synthetic construct
  source 1..31: mol_type = other RNA
gaggaaactcgacgcggcaccgagtcggtgc

SEQ ID NO: 6628 - RNA, 31 nt, synthetic construct
  source 1..31: mol_type = other RNA
gcagaaatgcgacgcggcaccgagtcggtgc

SEQ ID NO: 6629 - RNA, 31 nt, synthetic construct
  source 1..31: mol_type = other RNA
cttgaaaaaggacgcggcaccgagtcggtgc

SEQ ID NO: 6630 - RNA, 31 nt, synthetic construct
  source 1..31: mol_type = other RNA
gatgaaaatcgacgcggcaccgagtcggtgc

SEQ ID NO: 6631 - RNA, 31 nt, synthetic construct
  source 1..31: mol_type = other RNA
actgaaaagtgacgcggcaccgagtcggtgc

SEQ ID NO: 6632 - RNA, 31 nt, synthetic construct
  source 1..31: mol_type = other RNA
ccagaaatggtacgcggcaccgagtcggtgc

SEQ ID NO: 6633 - RNA, 31 nt, synthetic construct
  source 1..31: mol_type = other RNA
tccgaaaggagacgcggcaccgagtcggtgc

SEQ ID NO: 6634 - RNA, 32 nt, synthetic construct
  source 1..32: mol_type = other RNA
ggcgaaagcctcacgcggcaccgagtcggtgc

SEQ ID NO: 6635 - RNA, 32 nt, synthetic construct
  source 1..32: mol_type = other RNA
caggaaactgagacgcggcaccgagtcggtgc

SEQ ID NO: 6636 - RNA, 32 nt, synthetic construct
  source 1..32: mol_type = other RNA
gccgaaaggccgacgcggcaccgagtcggtgc

SEQ ID NO: 6637 - RNA, 32 nt, synthetic construct
  source 1..32: mol_type = other RNA
gatgaaagtcgcacgcggcaccgagtcggtgc

SEQ ID NO: 6638 - RNA, 32 nt, synthetic construct
  source 1..32: mol_type = other RNA
tgggaaaccactacgcggcaccgagtcggtgc

SEQ ID NO: 6639 - RNA, 32 nt, synthetic construct
  source 1..32: mol_type = other RNA
gccgaaaggcgaacgcggcaccgagtcggtgc

SEQ ID NO: 6640 - RNA, 32 nt, synthetic construct
  source 1..32: mol_type = other RNA
cgagaaattggcacgcggcaccgagtcggtgc

SEQ ID NO: 6641 - RNA, 32 nt, synthetic construct
  source 1..32: mol_type = other RNA
ctcgaaagagctacgcggcaccgagtcggtgc

SEQ ID NO: 6642 - RNA, 32 nt, synthetic construct
  source 1..32: mol_type = other RNA
ggagaaatcctgacgcggcaccgagtcggtgc

SEQ ID NO: 6643 - RNA, 32 nt, synthetic construct
  source 1..32: mol_type = other RNA
ggggaaacccgtacgcggcaccgagtcggtgc

SEQ ID NO: 6644 - RNA, 32 nt, synthetic construct
  source 1..32: mol_type = other RNA
ggtgaaagcctgacgcggcaccgagtcggtgc

SEQ ID NO: 6645 - RNA, 32 nt, synthetic construct
  source 1..32: mol_type = other RNA
caggaaactggaacgcggcaccgagtcggtgc

SEQ ID NO: 6646 - RNA, 32 nt, synthetic construct
  source 1..32: mol_type = other RNA
gaggaaactctcacgcggcaccgagtcggtgc

SEQ ID NO: 6647 - RNA, 32 nt, synthetic construct
  source 1..32: mol_type = other RNA
ctcgaaagagtgacgcggcaccgagtcggtgc

SEQ ID NO: 6648 - RNA, 32 nt, synthetic construct
  source 1..32: mol_type = other RNA
tgcgaaagcagcacgcggcaccgagtcggtgc

SEQ ID NO: 6649 - RNA, 32 nt, synthetic construct
  source 1..32: mol_type = other RNA
agggaaacctgcacgcggcaccgagtcggtgc

SEQ ID NO: 6650 - RNA, 32 nt, synthetic construct
  source 1..32: mol_type = other RNA
cctgaaagggacacgcggcaccgagtcggtgc

SEQ ID NO: 6651 - RNA, 32 nt, synthetic construct
  source 1..32: mol_type = other RNA
cccgaaagggttacgcggcaccgagtcggtgc

SEQ ID NO: 6652 - RNA, 32 nt, synthetic construct
  source 1..32: mol_type = other RNA
ccggaaacgggtacgcggcaccgagtcggtgc

SEQ ID NO: 6653 - RNA, 32 nt, synthetic construct
  source 1..32: mol_type = other RNA
gttgaaagacgcacgcggcaccgagtcggtgc

SEQ ID NO: 6654 - RNA, 32 nt, synthetic construct
  source 1..32: mol_type = other RNA
cgcgaaagcggcacgcggcaccgagtcggtgc

SEQ ID NO: 6655 - RNA, 32 nt, synthetic construct
  source 1..32: mol_type = other RNA
ggggaaatcccaacgcggcaccgagtcggtgc

SEQ ID NO: 6656 - RNA, 32 nt, synthetic construct
  source 1..32: mol_type = other RNA
agagaaatctgcacgcggcaccgagtcggtgc

SEQ ID NO: 6657 - RNA, 32 nt, synthetic construct
  source 1..32: mol_type = other RNA
cgtgaaaacgacacgcggcaccgagtcggtgc

SEQ ID NO: 6658 - RNA, 32 nt, synthetic construct
  source 1..32: mol_type = other RNA
tacgaaagtacgacgcggcaccgagtcggtgc

SEQ ID NO: 6659 - RNA, 32 nt, synthetic construct
  source 1..32: mol_type = other RNA
cgcgaaagcgtgacgcggcaccgagtcggtgc

SEQ ID NO: 6660 - RNA, 32 nt, synthetic construct
  source 1..32: mol_type = other RNA
gcggaaacgttgacgcggcaccgagtcggtgc

SEQ ID NO: 6661 - RNA, 32 nt, synthetic construct
  source 1..32: mol_type = other RNA
gacgaaagtcagacgcggcaccgagtcggtgc

SEQ ID NO: 6662 - RNA, 32 nt, synthetic construct
  source 1..32: mol_type = other RNA
cgcgaaagcgagacgcggcaccgagtcggtgc

SEQ ID NO: 6663 - RNA, 32 nt, synthetic construct
  source 1..32: mol_type = other RNA
ggcgaaagcctaacgcggcaccgagtcggtgc

SEQ ID NO: 6664 - RNA, 32 nt, synthetic construct
  source 1..32: mol_type = other RNA
agggaaacctggacgcggcaccgagtcggtgc

SEQ ID NO: 6665 - RNA, 32 nt, synthetic construct
  source 1..32: mol_type = other RNA
cctgaaaggggtacgcggcaccgagtcggtgc

SEQ ID NO: 6666 - RNA, 32 nt, synthetic construct
  source 1..32: mol_type = other RNA
ccggaaacggggacgcggcaccgagtcggtgc

SEQ ID NO: 6667 - RNA, 32 nt, synthetic construct
  source 1..32: mol_type = other RNA
acggaaacgtgtacgcggcaccgagtcggtgc

SEQ ID NO: 6668 - RNA, 32 nt, synthetic construct
  source 1..32: mol_type = other RNA
acggaaacgtggacgcggcaccgagtcggtgc

SEQ ID NO: 6669 - RNA, 32 nt, synthetic construct
  source 1..32: mol_type = other RNA
catgaaagtggcacgcggcaccgagtcggtgc

SEQ ID NO: 6670 - RNA, 32 nt, synthetic construct
  source 1..32: mol_type = other RNA
ctcgaaagaggtacgcggcaccgagtcggtgc

SEQ ID NO: 6671 - RNA, 32 nt, synthetic construct
  source 1..32: mol_type = other RNA
ctcgaaagaggcacgcggcaccgagtcggtgc

SEQ ID NO: 6672 - RNA, 32 nt, synthetic construct
  source 1..32: mol_type = other RNA
accgaaaggtcgacgcggcaccgagtcggtgc

SEQ ID NO: 6673 - RNA, 32 nt, synthetic construct
  source 1..32: mol_type = other RNA
gacgaaagtctgacgcggcaccgagtcggtgc

SEQ ID NO: 6674 - RNA, 32 nt, synthetic construct
  source 1..32: mol_type = other RNA
tgggaaaccgtcacgcggcaccgagtcggtgc

SEQ ID NO: 6675 - RNA, 32 nt, synthetic construct
  source 1..32: mol_type = other RNA
ggggaaacccctacgcggcaccgagtcggtgc

SEQ ID NO: 6676 - RNA, 32 nt, synthetic construct
  source 1..32: mol_type = other RNA
cacgaaagtggtacgcggcaccgagtcggtgc

SEQ ID NO: 6677 - RNA, 32 nt, synthetic construct
  source 1..32: mol_type = other RNA
gacgaaagtcgcacgcggcaccgagtcggtgc

SEQ ID NO: 6678 - RNA, 32 nt, synthetic construct
  source 1..32: mol_type = other RNA
ggggaaaccccgacgcggcaccgagtcggtgc

SEQ ID NO: 6679 - RNA, 32 nt, synthetic construct
  source 1..32: mol_type = other RNA
cgagaaatcggtacgcggcaccgagtcggtgc

SEQ ID NO: 6680 - RNA, 32 nt, synthetic construct
  source 1..32: mol_type = other RNA
tcggaaacgacgacgcggcaccgagtcggtgc

SEQ ID NO: 6681 - RNA, 32 nt, synthetic construct
  source 1..32: mol_type = other RNA
acggaaatgtccacgcggcaccgagtcggtgc

SEQ ID NO: 6682 - RNA, 32 nt, synthetic construct
  source 1..32: mol_type = other RNA
ggcgaaagcctgacgcggcaccgagtcggtgc

SEQ ID NO: 6683 - RNA, 32 nt, synthetic construct
  source 1..32: mol_type = other RNA
tccgaaaggaagacgcggcaccgagtcggtgc

SEQ ID NO: 6684 - RNA, 32 nt, synthetic construct
  source 1..32: mol_type = other RNA
cgagaaatcggaacgcggcaccgagtcggtgc

SEQ ID NO: 6685 - RNA, 32 nt, synthetic construct
  source 1..32: mol_type = other RNA
gccgaaaggtgtacgcggcaccgagtcggtgc

SEQ ID NO: 6686 - RNA, 32 nt, synthetic construct
  source 1..32: mol_type = other RNA
cgtgaaaacgctacgcggcaccgagtcggtgc

SEQ ID NO: 6687 - RNA, 32 nt, synthetic construct
  source 1..32: mol_type = other RNA
gacgaaagtcctacgcggcaccgagtcggtgc

SEQ ID NO: 6688 - RNA, 32 nt, synthetic construct
  source 1..32: mol_type = other RNA
ggggaaacccagacgcggcaccgagtcggtgc

SEQ ID NO: 6689 - RNA, 32 nt, synthetic construct
  source 1..32: mol_type = other RNA
atcgaaagatgcacgcggcaccgagtcggtgc

SEQ ID NO: 6690 - RNA, 32 nt, synthetic construct
  source 1..32: mol_type = other RNA
cgcgaaagcgttacgcggcaccgagtcggtgc

SEQ ID NO: 6691 - RNA, 32 nt, synthetic construct
  source 1..32: mol_type = other RNA
caggaaactggcacgcggcaccgagtcggtgc

SEQ ID NO: 6692 - RNA, 32 nt, synthetic construct
  source 1..32: mol_type = other RNA
acggaaacgtgaacgcggcaccgagtcggtgc

SEQ ID NO: 6693 - RNA, 32 nt, synthetic construct
  source 1..32: mol_type = other RNA
gacgaaagtcgtacgcggcaccgagtcggtgc

SEQ ID NO: 6694 - RNA, 32 nt, synthetic construct
  source 1..32: mol_type = other RNA
tgggaaaccagcacgcggcaccgagtcggtgc

SEQ ID NO: 6695 - RNA, 32 nt, synthetic construct
  source 1..32: mol_type = other RNA
ccagaaatggggacgcggcaccgagtcggtgc

SEQ ID NO: 6696 - RNA, 32 nt, synthetic construct
  source 1..32: mol_type = other RNA
ggggaaaccccaacgcggcaccgagtcggtgc

SEQ ID NO: 6697 - RNA, 32 nt, synthetic construct
  source 1..32: mol_type = other RNA
cccgaaagggctacgcggcaccgagtcggtgc

SEQ ID NO: 6698 - RNA, 32 nt, synthetic construct
  source 1..32: mol_type = other RNA
ccagaaatgggtacgcggcaccgagtcggtgc

SEQ ID NO: 6699 - RNA, 32 nt, synthetic construct
  source 1..32: mol_type = other RNA
cgtgaaagcgctacgcggcaccgagtcggtgc

SEQ ID NO: 6700 - RNA, 32 nt, synthetic construct
  source 1..32: mol_type = other RNA
ctagaaataggcacgcggcaccgagtcggtgc

SEQ ID NO: 6701 - RNA, 32 nt, synthetic construct
  source 1..32: mol_type = other RNA
gtcgaaagacagacgcggcaccgagtcggtgc

SEQ ID NO: 6702 - RNA, 32 nt, synthetic construct
  source 1..32: mol_type = other RNA
agggaaacctacacgcggcaccgagtcggtgc

SEQ ID NO: 6703 - RNA, 32 nt, synthetic construct
  source 1..32: mol_type = other RNA
gctgaaaggcggacgcggcaccgagtcggtgc

SEQ ID NO: 6704 - RNA, 32 nt, synthetic construct
  source 1..32: mol_type = other RNA
gtcgaaaggcacacgcggcaccgagtcggtgc

SEQ ID NO: 6705 - RNA, 32 nt, synthetic construct
  source 1..32: mol_type = other RNA
tacgaaagtgggacgcggcaccgagtcggtgc

SEQ ID NO: 6706 - RNA, 32 nt, synthetic construct
  source 1..32: mol_type = other RNA
ggggaaacccacacgcggcaccgagtcggtgc

SEQ ID NO: 6707 - RNA, 32 nt, synthetic construct
  source 1..32: mol_type = other RNA
ggtgaaaactcgacgcggcaccgagtcggtgc

SEQ ID NO: 6708 - RNA, 32 nt, synthetic construct
  source 1..32: mol_type = other RNA
tcggaaacgacaacgcggcaccgagtcggtgc

SEQ ID NO: 6709 - RNA, 32 nt, synthetic construct
  source 1..32: mol_type = other RNA
cccgaaagggggacgcggcaccgagtcggtgc

SEQ ID NO: 6710 - RNA, 32 nt, synthetic construct
  source 1..32: mol_type = other RNA
ggcgaaagcccaacgcggcaccgagtcggtgc

SEQ ID NO: 6711 - RNA, 32 nt, synthetic construct
  source 1..32: mol_type = other RNA
accgaaaggttcacgcggcaccgagtcggtgc

SEQ ID NO: 6712 - RNA, 32 nt, synthetic construct
  source 1..32: mol_type = other RNA
cgcgaaagcgatacgcggcaccgagtcggtgc

SEQ ID NO: 6713 - RNA, 32 nt, synthetic construct
  source 1..32: mol_type = other RNA
tgcgaaagcaggacgcggcaccgagtcggtgc

SEQ ID NO: 6714 - RNA, 32 nt, synthetic construct
  source 1..32: mol_type = other RNA
cctgaaaaggtcacgcggcaccgagtcggtgc

SEQ ID NO: 6715 - RNA, 32 nt, synthetic construct
  source 1..32: mol_type = other RNA
accgaaaggtgcacgcggcaccgagtcggtgc

SEQ ID NO: 6716 - RNA, 32 nt, synthetic construct
  source 1..32: mol_type = other RNA
ggcgaaagccctacgcggcaccgagtcggtgc

SEQ ID NO: 6717 - RNA, 32 nt, synthetic construct
  source 1..32: mol_type = other RNA
tcggaaacggtcacgcggcaccgagtcggtgc

SEQ ID NO: 6718 - RNA, 32 nt, synthetic construct
  source 1..32: mol_type = other RNA
cgtgaaagcgtgacgcggcaccgagtcggtgc

SEQ ID NO: 6719 - RNA, 32 nt, synthetic construct
  source 1..32: mol_type = other RNA
caggaaactgggacgcggcaccgagtcggtgc

SEQ ID NO: 6720 - RNA, 32 nt, synthetic construct
  source 1..32: mol_type = other RNA
gccgaaaggcggacgcggcaccgagtcggtgc

SEQ ID NO: 6721 - RNA, 32 nt, synthetic construct
  source 1..32: mol_type = other RNA
gcagaaatgcagacgcggcaccgagtcggtgc

SEQ ID NO: 6722 - RNA, 32 nt, synthetic construct
  source 1..32: mol_type = other RNA
taggaaactaccacgcggcaccgagtcggtgc

SEQ ID NO: 6723 - RNA, 32 nt, synthetic construct
  source 1..32: mol_type = other RNA
cctgaaaaggccacgcggcaccgagtcggtgc

SEQ ID NO: 6724 - RNA, 32 nt, synthetic construct
  source 1..32: mol_type = other RNA
gacgaaagtctcacgcggcaccgagtcggtgc

SEQ ID NO: 6725 - RNA, 32 nt, synthetic construct
  source 1..32: mol_type = other RNA
accgaaaggtggacgcggcaccgagtcggtgc

SEQ ID NO: 6726 - RNA, 32 nt, synthetic construct
  source 1..32: mol_type = other RNA
tccgaaaggaacacgcggcaccgagtcggtgc

SEQ ID NO: 6727 - RNA, 32 nt, synthetic construct
  source 1..32: mol_type = other RNA
gcggaaacgcgtacgcggcaccgagtcggtgc

SEQ ID NO: 6728 - RNA, 32 nt, synthetic construct
  source 1..32: mol_type = other RNA
accgaaaggtgaacgcggcaccgagtcggtgc

SEQ ID NO: 6729 - RNA, 32 nt, synthetic construct
  source 1..32: mol_type = other RNA
acggaaacgtgcacgcggcaccgagtcggtgc

SEQ ID NO: 6730 - RNA, 33 nt, synthetic construct
  source 1..33: mol_type = other RNA
gcggaaacgcatgacgcggcaccgagtcggtgc

SEQ ID NO: 6731 - RNA, 33 nt, synthetic construct
  source 1..33: mol_type = other RNA
gttgaaaaaccccacgcggcaccgagtcggtgc

SEQ ID NO: 6732 - RNA, 33 nt, synthetic construct
  source 1..33: mol_type = other RNA
agcgaaagctgtcacgcggcaccgagtcggtgc

SEQ ID NO: 6733 - RNA, 33 nt, synthetic construct
  source 1..33: mol_type = other RNA
gtagaaatacgctacgcggcaccgagtcggtgc

SEQ ID NO: 6734 - RNA, 33 nt, synthetic construct
  source 1..33: mol_type = other RNA
acggaaacgttgcacgcggcaccgagtcggtgc

SEQ ID NO: 6735 - RNA, 33 nt, synthetic construct
  source 1..33: mol_type = other RNA
cacgaaagtgacgacgcggcaccgagtcggtgc

SEQ ID NO: 6736 - RNA, 33 nt, synthetic construct
  source 1..33: mol_type = other RNA
accgaaaggtgtgacgcggcaccgagtcggtgc

SEQ ID NO: 6737 - RNA, 33 nt, synthetic construct
  source 1..33: mol_type = other RNA
gcggaaacgcgtcacgcggcaccgagtcggtgc

SEQ ID NO: 6738 - RNA, 33 nt, synthetic construct
  source 1..33: mol_type = other RNA
gccgaaaggcaacacgcggcaccgagtcggtgc

SEQ ID NO: 6739 - RNA, 33 nt, synthetic construct
  source 1..33: mol_type = other RNA
ggcgaaagccttaacgcggcaccgagtcggtgc

SEQ ID NO: 6740 - RNA, 33 nt, synthetic construct
  source 1..33: mol_type = other RNA
cgggaaaccggggacgcggcaccgagtcggtgc

SEQ ID NO: 6741 - RNA, 33 nt, synthetic construct
  source 1..33: mol_type = other RNA
tcggaaacgatagacgcggcaccgagtcggtgc

SEQ ID NO: 6742 - RNA, 33 nt, synthetic construct
  source 1..33: mol_type = other RNA
ggtgaaagccgggacgcggcaccgagtcggtgc

SEQ ID NO: 6743 - RNA, 33 nt, synthetic construct
  source 1..33: mol_type = other RNA
tatgaaaatagggacgcggcaccgagtcggtgc

SEQ ID NO: 6744 - RNA, 33 nt, synthetic construct
  source 1..33: mol_type = other RNA
gcggaaacgcttgacgcggcaccgagtcggtgc

SEQ ID NO: 6745 - RNA, 33 nt, synthetic construct
  source 1..33: mol_type = other RNA
gcggaaacgctctacgcggcaccgagtcggtgc

SEQ ID NO: 6746 - RNA, 33 nt, synthetic construct
  source 1..33: mol_type = other RNA
acggaaacgtggaacgcggcaccgagtcggtgc

SEQ ID NO: 6747 - RNA, 33 nt, synthetic construct
  source 1..33: mol_type = other RNA
atcgaaagatcccacgcggcaccgagtcggtgc

SEQ ID NO: 6748 - RNA, 33 nt, synthetic construct
  source 1..33: mol_type = other RNA
cttgaaagaggccacgcggcaccgagtcggtgc

SEQ ID NO: 6749 - RNA, 33 nt, synthetic construct
  source 1..33: mol_type = other RNA
gacgaaagttctcacgcggcaccgagtcggtgc

SEQ ID NO: 6750 - RNA, 33 nt, synthetic construct
  source 1..33: mol_type = other RNA
gcagaaatgcggtacgcggcaccgagtcggtgc

SEQ ID NO: 6751 - RNA, 33 nt, synthetic construct
  source 1..33: mol_type = other RNA
accgaaaggtcttacgcggcaccgagtcggtgc

SEQ ID NO: 6752 - RNA, 33 nt, synthetic construct
  source 1..33: mol_type = other RNA
accgaaaggtccaacgcggcaccgagtcggtgc

SEQ ID NO: 6753 - RNA, 33 nt, synthetic construct
  source 1..33: mol_type = other RNA
gctgaaaggcgtgacgcggcaccgagtcggtgc

SEQ ID NO: 6754 - RNA, 33 nt, synthetic construct
  source 1..33: mol_type = other RNA
cgagaaatcgagtacgcggcaccgagtcggtgc

SEQ ID NO: 6755 - RNA, 33 nt, synthetic construct
  source 1..33: mol_type = other RNA
cgtgaaaacggggacgcggcaccgagtcggtgc

SEQ ID NO: 6756 - RNA, 33 nt, synthetic construct
  source 1..33: mol_type = other RNA
ggagaaatccggtacgcggcaccgagtcggtgc

SEQ ID NO: 6757 - RNA, 33 nt, synthetic construct
  source 1..33: mol_type = other RNA
gaagaaattcccaacgcggcaccgagtcggtgc

SEQ ID NO: 6758 - RNA, 33 nt, synthetic construct
  source 1..33: mol_type = other RNA
gcggaaacgctagacgcggcaccgagtcggtgc

SEQ ID NO: 6759 - RNA, 33 nt, synthetic construct
  source 1..33: mol_type = other RNA
tcagaaatgagtcacgcggcaccgagtcggtgc

SEQ ID NO: 6760 - RNA, 33 nt, synthetic construct
  source 1..33: mol_type = other RNA
cgagaaatcgtgaacgcggcaccgagtcggtgc

SEQ ID NO: 6761 - RNA, 33 nt, synthetic construct
  source 1..33: mol_type = other RNA
tacgaaagtaaggacgcggcaccgagtcggtgc

SEQ ID NO: 6762 - RNA, 33 nt, synthetic construct
  source 1..33: mol_type = other RNA
gaggaaactcaccacgcggcaccgagtcggtgc

SEQ ID NO: 6763 - RNA, 33 nt, synthetic construct
  source 1..33: mol_type = other RNA
ctggaaacagtgcacgcggcaccgagtcggtgc

SEQ ID NO: 6764 - RNA, 33 nt, synthetic construct
  source 1..33: mol_type = other RNA
ccagaaatggagcacgcggcaccgagtcggtgc

SEQ ID NO: 6765 - RNA, 33 nt, synthetic construct
  source 1..33: mol_type = other RNA
agagaaatctcctacgcggcaccgagtcggtgc

SEQ ID NO: 6766 - RNA, 33 nt, synthetic construct
  source 1..33: mol_type = other RNA
gcggaaacgctgtacgcggcaccgagtcggtgc

SEQ ID NO: 6767 - RNA, 33 nt, synthetic construct
  source 1..33: mol_type = other RNA
gcggaaacgctacacgcggcaccgagtcggtgc

SEQ ID NO: 6768 - RNA, 33 nt, synthetic construct
  source 1..33: mol_type = other RNA
cctgaaaaggatgacgcggcaccgagtcggtgc

SEQ ID NO: 6769 - RNA, 33 nt, synthetic construct
  source 1..33: mol_type = other RNA
taggaaactaggaacgcggcaccgagtcggtgc

SEQ ID NO: 6770 - RNA, 33 nt, synthetic construct
  source 1..33: mol_type = other RNA
agcgaaagctcggacgcggcaccgagtcggtgc

SEQ ID NO: 6771 - RNA, 33 nt, synthetic construct
  source 1..33: mol_type = other RNA
ttcgaaaggagggacgcggcaccgagtcggtgc

SEQ ID NO: 6772 - RNA, 33 nt, synthetic construct
  source 1..33: mol_type = other RNA
gcggaaacgcgtgacgcggcaccgagtcggtgc

SEQ ID NO: 6773 - RNA, 33 nt, synthetic construct
  source 1..33: mol_type = other RNA
ctggaaacagtgaacgcggcaccgagtcggtgc

SEQ ID NO: 6774 - RNA, 33 nt, synthetic construct
  source 1..33: mol_type = other RNA
ctcgaaagaggccacgcggcaccgagtcggtgc

SEQ ID NO: 6775 - RNA, 33 nt, synthetic construct
  source 1..33: mol_type = other RNA
gtagaaatgcgggacgcggcaccgagtcggtgc

SEQ ID NO: 6776 - RNA, 33 nt, synthetic construct
  source 1..33: mol_type = other RNA
ccggaaacggtacacgcggcaccgagtcggtgc

SEQ ID NO: 6777 - RNA, 33 nt, synthetic construct
  source 1..33: mol_type = other RNA
ctcgaaagggactacgcggcaccgagtcggtgc

SEQ ID NO: 6778 - RNA, 33 nt, synthetic construct
  source 1..33: mol_type = other RNA
cttgaaaaaggtcacgcggcaccgagtcggtgc

SEQ ID NO: 6779 - RNA, 33 nt, synthetic construct
  source 1..33: mol_type = other RNA
ccggaaacggggcacgcggcaccgagtcggtgc

SEQ ID NO: 6780 - RNA, 33 nt, synthetic construct
  source 1..33: mol_type = other RNA
tctgaaaaggcagacgcggcaccgagtcggtgc

SEQ ID NO: 6781 - RNA, 33 nt, synthetic construct
  source 1..33: mol_type = other RNA
cctgaaaaggctcacgcggcaccgagtcggtgc

SEQ ID NO: 6782 - RNA, 33 nt, synthetic construct
  source 1..33: mol_type = other RNA
taggaaactgggcacgcggcaccgagtcggtgc

SEQ ID NO: 6783 - RNA, 33 nt, synthetic construct
  source 1..33: mol_type = other RNA
gccgaaaggctcaacgcggcaccgagtcggtgc

SEQ ID NO: 6784 - RNA, 33 nt, synthetic construct
  source 1..33: mol_type = other RNA
agggaaacctgttacgcggcaccgagtcggtgc

SEQ ID NO: 6785 - RNA, 33 nt, synthetic construct
  source 1..33: mol_type = other RNA
actgaaaagtgtcacgcggcaccgagtcggtgc

SEQ ID NO: 6786 - RNA, 33 nt, synthetic construct
  source 1..33: mol_type = other RNA
tcagaaatgagggacgcggcaccgagtcggtgc

SEQ ID NO: 6787 - RNA, 33 nt, synthetic construct
  source 1..33: mol_type = other RNA
ttcgaaagaacctacgcggcaccgagtcggtgc

SEQ ID NO: 6788 - RNA, 33 nt, synthetic construct
  source 1..33: mol_type = other RNA
tcggaaacgaaacacgcggcaccgagtcggtgc

SEQ ID NO: 6789 - RNA, 33 nt, synthetic construct
  source 1..33: mol_type = other RNA
tccgaaaggaagaacgcggcaccgagtcggtgc

SEQ ID NO: 6790 - RNA, 33 nt, synthetic construct
  source 1..33: mol_type = other RNA
tccgaaaggggatacgcggcaccgagtcggtgc

SEQ ID NO: 6791 - RNA, 33 nt, synthetic construct
  source 1..33: mol_type = other RNA
cacgaaagtgtgtacgcggcaccgagtcggtgc

SEQ ID NO: 6792 - RNA, 33 nt, synthetic construct
  source 1..33: mol_type = other RNA
tttgaaaaaagccacgcggcaccgagtcggtgc

SEQ ID NO: 6793 - RNA, 33 nt, synthetic construct
  source 1..33: mol_type = other RNA
gccgaaaggctttacgcggcaccgagtcggtgc

SEQ ID NO: 6794 - RNA, 33 nt, synthetic construct
  source 1..33: mol_type = other RNA
ccagaaatggaccacgcggcaccgagtcggtgc

SEQ ID NO: 6795 - RNA, 33 nt, synthetic construct
  source 1..33: mol_type = other RNA
ctagaaataggcaacgcggcaccgagtcggtgc

SEQ ID NO: 6796 - RNA, 33 nt, synthetic construct
  source 1..33: mol_type = other RNA
aacgaaagttgctacgcggcaccgagtcggtgc

SEQ ID NO: 6797 - RNA, 33 nt, synthetic construct
  source 1..33: mol_type = other RNA
tcagaaatggccaacgcggcaccgagtcggtgc

SEQ ID NO: 6798 - RNA, 33 nt, synthetic construct
  source 1..33: mol_type = other RNA
agggaaactttggacgcggcaccgagtcggtgc

SEQ ID NO: 6799 - RNA, 33 nt, synthetic construct
  source 1..33: mol_type = other RNA
cacgaaagtggaaacgcggcaccgagtcggtgc

SEQ ID NO: 6800 - RNA, 33 nt, synthetic construct
  source 1..33: mol_type = other RNA
cgggaaaccgcgcacgcggcaccgagtcggtgc

SEQ ID NO: 6801 - RNA, 33 nt, synthetic construct
  source 1..33: mol_type = other RNA
tgagaaattagggacgcggcaccgagtcggtgc

SEQ ID NO: 6802 - RNA, 33 nt, synthetic construct
  source 1..33: mol_type = other RNA
gtggaaacacgtgacgcggcaccgagtcggtgc

SEQ ID NO: 6803 - RNA, 33 nt, synthetic construct
  source 1..33: mol_type = other RNA
ctcgaaagagggcacgcggcaccgagtcggtgc

SEQ ID NO: 6804 - RNA, 33 nt, synthetic construct
  source 1..33: mol_type = other RNA
ggtgaaagcctgcacgcggcaccgagtcggtgc

SEQ ID NO: 6805 - RNA, 33 nt, synthetic construct
  source 1..33: mol_type = other RNA
gcagaaatgcgctacgcggcaccgagtcggtgc

SEQ ID NO: 6806 - RNA, 33 nt, synthetic construct
  source 1..33: mol_type = other RNA
ggggaaaccctggacgcggcaccgagtcggtgc

SEQ ID NO: 6807 - RNA, 33 nt, synthetic construct
  source 1..33: mol_type = other RNA
cgagaaattggctacgcggcaccgagtcggtgc

SEQ ID NO: 6808 - RNA, 33 nt, synthetic construct
  source 1..33: mol_type = other RNA
gcggaaacgcgtaacgcggcaccgagtcggtgc

SEQ ID NO: 6809 - RNA, 33 nt, synthetic construct
  source 1..33: mol_type = other RNA
ctcgaaagggtgtacgcggcaccgagtcggtgc

SEQ ID NO: 6810 - RNA, 33 nt, synthetic construct
  source 1..33: mol_type = other RNA
accgaaaggtgctacgcggcaccgagtcggtgc

SEQ ID NO: 6811 - RNA, 33 nt, synthetic construct
  source 1..33: mol_type = other RNA
ggggaaacccccaacgcggcaccgagtcggtgc

SEQ ID NO: 6812 - RNA, 33 nt, synthetic construct
  source 1..33: mol_type = other RNA
ggtgaaagccaccacgcggcaccgagtcggtgc

SEQ ID NO: 6813 - RNA, 33 nt, synthetic construct
  source 1..33: mol_type = other RNA
gaggaaactctccacgcggcaccgagtcggtgc

SEQ ID NO: 6814 - RNA, 33 nt, synthetic construct
  source 1..33: mol_type = other RNA
tgggaaaccaaacacgcggcaccgagtcggtgc

SEQ ID NO: 6815 - RNA, 33 nt, synthetic construct
  source 1..33: mol_type = other RNA
aacgaaagttggaacgcggcaccgagtcggtgc

SEQ ID NO: 6816 - RNA, 33 nt, synthetic construct
  source 1..33: mol_type = other RNA
cgcgaaagcgcgtacgcggcaccgagtcggtgc

SEQ ID NO: 6817 - RNA, 33 nt, synthetic construct
  source 1..33: mol_type = other RNA
gtcgaaaggcagcacgcggcaccgagtcggtgc

SEQ ID NO: 6818 - RNA, 33 nt, synthetic construct
  source 1..33: mol_type = other RNA
gtcgaaagacgagacgcggcaccgagtcggtgc

SEQ ID NO: 6819 - RNA, 33 nt, synthetic construct
  source 1..33: mol_type = other RNA
caggaaactggtcacgcggcaccgagtcggtgc

SEQ ID NO: 6820 - RNA, 33 nt, synthetic construct
  source 1..33: mol_type = other RNA
gtggaaacacgccacgcggcaccgagtcggtgc

SEQ ID NO: 6821 - RNA, 33 nt, synthetic construct
  source 1..33: mol_type = other RNA
gccgaaaggcaaaacgcggcaccgagtcggtgc

SEQ ID NO: 6822 - RNA, 33 nt, synthetic construct
  source 1..33: mol_type = other RNA
gacgaaagtcactacgcggcaccgagtcggtgc

SEQ ID NO: 6823 - RNA, 33 nt, synthetic construct
  source 1..33: mol_type = other RNA
aaggaaacttaggacgcggcaccgagtcggtgc

SEQ ID NO: 6824 - RNA, 33 nt, synthetic construct
  source 1..33: mol_type = other RNA
ctagaaataggctacgcggcaccgagtcggtgc

SEQ ID NO: 6825 - RNA, 33 nt, synthetic construct
  source 1..33: mol_type = other RNA
agcgaaagctcatacgcggcaccgagtcggtgc

SEQ ID NO: 6826 - RNA, 33 nt, synthetic construct
  source 1..33: mol_type = other RNA
atcgaaagatccaacgcggcaccgagtcggtgc

SEQ ID NO: 6827 - RNA, 33 nt, synthetic construct
  source 1..33: mol_type = other RNA
caagaaattgcccacgcggcaccgagtcggtgc

SEQ ID NO: 6828 - RNA, 34 nt, synthetic construct
  source 1..34: mol_type = other RNA
cgcgaaagcgacgaacgcggcaccgagtcggtgc

SEQ ID NO: 6829 - RNA, 34 nt, synthetic construct
  source 1..34: mol_type = other RNA
cgcgaaagcgcactacgcggcaccgagtcggtgc

SEQ ID NO: 6830 - RNA, 34 nt, synthetic construct
  source 1..34: mol_type = other RNA
cgggaaactgtgtcacgcggcaccgagtcggtgc

SEQ ID NO: 6831 - RNA, 34 nt, synthetic construct
  source 1..34: mol_type = other RNA
ggggaaacccttagacgcggcaccgagtcggtgc

SEQ ID NO: 6832 - RNA, 34 nt, synthetic construct
  source 1..34: mol_type = other RNA
tcggaaacgagtctacgcggcaccgagtcggtgc

SEQ ID NO: 6833 - RNA, 34 nt, synthetic construct
  source 1..34: mol_type = other RNA
gacgaaagtcggcgacgcggcaccgagtcggtgc

SEQ ID NO: 6834 - RNA, 34 nt, synthetic construct
  source 1..34: mol_type = other RNA
tcggaaacgactgtacgcggcaccgagtcggtgc

SEQ ID NO: 6835 - RNA, 34 nt, synthetic construct
  source 1..34: mol_type = other RNA
ctggaaacaggccaacgcggcaccgagtcggtgc

SEQ ID NO: 6836 - RNA, 34 nt, synthetic construct
  source 1..34: mol_type = other RNA
gtcgaaagacgggcacgcggcaccgagtcggtgc

SEQ ID NO: 6837 - RNA, 34 nt, synthetic construct
  source 1..34: mol_type = other RNA
gctgaaaggcccggacgcggcaccgagtcggtgc

SEQ ID NO: 6838 - RNA, 34 nt, synthetic construct
  source 1..34: mol_type = other RNA
gtggaaatacgctgacgcggcaccgagtcggtgc

SEQ ID NO: 6839 - RNA, 34 nt, synthetic construct
  source 1..34: mol_type = other RNA
cacgaaagtgccccacgcggcaccgagtcggtgc

SEQ ID NO: 6840 - RNA, 34 nt, synthetic construct
  source 1..34: mol_type = other RNA
ccggaaatggacccacgcggcaccgagtcggtgc

SEQ ID NO: 6841 - RNA, 34 nt, synthetic construct
  source 1..34: mol_type = other RNA
acggaaacgtgttgacgcggcaccgagtcggtgc

SEQ ID NO: 6842 - RNA, 34 nt, synthetic construct
  source 1..34: mol_type = other RNA
gctgaaaagccacaacgcggcaccgagtcggtgc

SEQ ID NO: 6843 - RNA, 34 nt, synthetic construct
  source 1..34: mol_type = other RNA
accgaaaggtaacgacgcggcaccgagtcggtgc

SEQ ID NO: 6844 - RNA, 34 nt, synthetic construct
  source 1..34: mol_type = other RNA
agcgaaagctaggcacgcggcaccgagtcggtgc

SEQ ID NO: 6845 - RNA, 34 nt, synthetic construct
  source 1..34: mol_type = other RNA
gcagaaatgcggttacgcggcaccgagtcggtgc

SEQ ID NO: 6846 - RNA, 34 nt, synthetic construct
  source 1..34: mol_type = other RNA
tgggaaaccggtgtacgcggcaccgagtcggtgc

SEQ ID NO: 6847 - RNA, 34 nt, synthetic construct
  source 1..34: mol_type = other RNA
ggggaaatccccgcacgcggcaccgagtcggtgc

SEQ ID NO: 6848 - RNA, 34 nt, synthetic construct
  source 1..34: mol_type = other RNA
ttcgaaaggacggaacgcggcaccgagtcggtgc

SEQ ID NO: 6849 - RNA, 34 nt, synthetic construct
  source 1..34: mol_type = other RNA
gccgaaaggccaggacgcggcaccgagtcggtgc

SEQ ID NO: 6850 - RNA, 34 nt, synthetic construct
  source 1..34: mol_type = other RNA
accgaaaggtcctgacgcggcaccgagtcggtgc

SEQ ID NO: 6851 - RNA, 34 nt, synthetic construct
  source 1..34: mol_type = other RNA
ggagaaatccggggacgcggcaccgagtcggtgc

SEQ ID NO: 6852 - RNA, 34 nt, synthetic construct
  source 1..34: mol_type = other RNA
cgagaaatcgactcacgcggcaccgagtcggtgc

SEQ ID NO: 6853 - RNA, 34 nt, synthetic construct
  source 1..34: mol_type = other RNA
gttgaaagacagggacgcggcaccgagtcggtgc

SEQ ID NO: 6854 - RNA, 34 nt, synthetic construct
  source 1..34: mol_type = other RNA
ccggaaacggtggtacgcggcaccgagtcggtgc

SEQ ID NO: 6855 - RNA, 34 nt, synthetic construct
  source 1..34: mol_type = other RNA
ctggaaacagcgtcacgcggcaccgagtcggtgc

SEQ ID NO: 6856 - RNA, 34 nt, synthetic construct
  source 1..34: mol_type = other RNA
gcggaaacgcgcgaacgcggcaccgagtcggtgc

SEQ ID NO: 6857 - RNA, 34 nt, synthetic construct
  source 1..34: mol_type = other RNA
atggaaacatcccgacgcggcaccgagtcggtgc

SEQ ID NO: 6858 - RNA, 34 nt, synthetic construct
  source 1..34: mol_type = other RNA
cgcgaaagcggtgcacgcggcaccgagtcggtgc

SEQ ID NO: 6859 - RNA, 34 nt, synthetic construct
  source 1..34: mol_type = other RNA
gctgaaaagcgcggacgcggcaccgagtcggtgc

SEQ ID NO: 6860 - RNA, 34 nt, synthetic construct
  source 1..34: mol_type = other RNA
gaggaaactctcgtacgcggcaccgagtcggtgc

SEQ ID NO: 6861 - RNA, 34 nt, synthetic construct
  source 1..34: mol_type = other RNA
ctcgaaagagtgtcacgcggcaccgagtcggtgc

SEQ ID NO: 6862 - RNA, 34 nt, synthetic construct
  source 1..34: mol_type = other RNA
ctcgaaagaggcatacgcggcaccgagtcggtgc

SEQ ID NO: 6863 - RNA, 34 nt, synthetic construct
  source 1..34: mol_type = other RNA
cgggaaaccgttgcacgcggcaccgagtcggtgc

SEQ ID NO: 6864 - RNA, 34 nt, synthetic construct
  source 1..34: mol_type = other RNA
tcggaaacgatcggacgcggcaccgagtcggtgc

SEQ ID NO: 6865 - RNA, 34 nt, synthetic construct
  source 1..34: mol_type = other RNA
tgcgaaagcaacagacgcggcaccgagtcggtgc

SEQ ID NO: 6866 - RNA, 34 nt, synthetic construct
  source 1..34: mol_type = other RNA
ttcgaaagaatcccacgcggcaccgagtcggtgc

SEQ ID NO: 6867 - RNA, 34 nt, synthetic construct
  source 1..34: mol_type = other RNA
caggaaactgggtaacgcggcaccgagtcggtgc

SEQ ID NO: 6868 - RNA, 34 nt, synthetic construct
  source 1..34: mol_type = other RNA
tccgaaaggaaggtacgcggcaccgagtcggtgc

SEQ ID NO: 6869 - RNA, 34 nt, synthetic construct
  source 1..34: mol_type = other RNA
gcagaaatgccgagacgcggcaccgagtcggtgc

SEQ ID NO: 6870 - RNA, 34 nt, synthetic construct
  source 1..34: mol_type = other RNA
gccgaaaggcttagacgcggcaccgagtcggtgc

SEQ ID NO: 6871 - RNA, 34 nt, synthetic construct
  source 1..34: mol_type = other RNA
ctcgaaagagggccacgcggcaccgagtcggtgc

SEQ ID NO: 6872 - RNA, 34 nt, synthetic construct
  source 1..34: mol_type = other RNA
ggagaaatcctgcgacgcggcaccgagtcggtgc

SEQ ID NO: 6873 - RNA, 34 nt, synthetic construct
  source 1..34: mol_type = other RNA
cgtgaaaacggctaacgcggcaccgagtcggtgc

SEQ ID NO: 6874 - RNA, 34 nt, synthetic construct
  source 1..34: mol_type = other RNA
gtggaaacaccttgacgcggcaccgagtcggtgc

SEQ ID NO: 6875 - RNA, 34 nt, synthetic construct
  source 1..34: mol_type = other RNA
ccggaaacggttggacgcggcaccgagtcggtgc

SEQ ID NO: 6876 - RNA, 34 nt, synthetic construct
  source 1..34: mol_type = other RNA
gaggaaacttgtgcacgcggcaccgagtcggtgc

SEQ ID NO: 6877 - RNA, 34 nt, synthetic construct
  source 1..34: mol_type = other RNA
tgtgaaagcacacgacgcggcaccgagtcggtgc

SEQ ID NO: 6878 - RNA, 34 nt, synthetic construct
  source 1..34: mol_type = other RNA
tgcgaaagcaccagacgcggcaccgagtcggtgc

SEQ ID NO: 6879 - RNA, 34 nt, synthetic construct
  source 1..34: mol_type = other RNA
agggaaacctgacaacgcggcaccgagtcggtgc

SEQ ID NO: 6880 - RNA, 34 nt, synthetic construct
  source 1..34: mol_type = other RNA
gatgaaaatcccggacgcggcaccgagtcggtgc

SEQ ID NO: 6881 - RNA, 34 nt, synthetic construct
  source 1..34: mol_type = other RNA
ccggaaacggatctacgcggcaccgagtcggtgc

SEQ ID NO: 6882 - RNA, 34 nt, synthetic construct
  source 1..34: mol_type = other RNA
ggcgaaagccaagtacgcggcaccgagtcggtgc

SEQ ID NO: 6883 - RNA, 34 nt, synthetic construct
  source 1..34: mol_type = other RNA
gccgaaaggccattacgcggcaccgagtcggtgc

SEQ ID NO: 6884 - RNA, 34 nt, synthetic construct
  source 1..34: mol_type = other RNA
cgcgaaagtggtggacgcggcaccgagtcggtgc

SEQ ID NO: 6885 - RNA, 34 nt, synthetic construct
  source 1..34: mol_type = other RNA
cccgaaagggggtcacgcggcaccgagtcggtgc

SEQ ID NO: 6886 - RNA, 34 nt, synthetic construct
  source 1..34: mol_type = other RNA
acggaaacgttccgacgcggcaccgagtcggtgc

SEQ ID NO: 6887 - RNA, 34 nt, synthetic construct
  source 1..34: mol_type = other RNA
gcggaaacgctccaacgcggcaccgagtcggtgc

SEQ ID NO: 6888 - RNA, 34 nt, synthetic construct
  source 1..34: mol_type = other RNA
tccgaaaggaacgtacgcggcaccgagtcggtgc

SEQ ID NO: 6889 - RNA, 34 nt, synthetic construct
  source 1..34: mol_type = other RNA
ctagaaatagcgacacgcggcaccgagtcggtgc

SEQ ID NO: 6890 - RNA, 34 nt, synthetic construct
  source 1..34: mol_type = other RNA
agcgaaagctcttcacgcggcaccgagtcggtgc

SEQ ID NO: 6891 - RNA, 34 nt, synthetic construct
  source 1..34: mol_type = other RNA
ggggaaactcgcttacgcggcaccgagtcggtgc

SEQ ID NO: 6892 - RNA, 34 nt, synthetic construct
  source 1..34: mol_type = other RNA
ttcgaaagggcagcacgcggcaccgagtcggtgc

SEQ ID NO: 6893 - RNA, 34 nt, synthetic construct
  source 1..34: mol_type = other RNA
caggaaactgggctacgcggcaccgagtcggtgc

SEQ ID NO: 6894 - RNA, 34 nt, synthetic construct
  source 1..34: mol_type = other RNA
ccagaaatggaggcacgcggcaccgagtcggtgc

SEQ ID NO: 6895 - RNA, 34 nt, synthetic construct
  source 1..34: mol_type = other RNA
ggtgaaaaccggctacgcggcaccgagtcggtgc

SEQ ID NO: 6896 - RNA, 34 nt, synthetic construct
  source 1..34: mol_type = other RNA
gcggaaacgccgtcacgcggcaccgagtcggtgc

SEQ ID NO: 6897 - RNA, 34 nt, synthetic construct
  source 1..34: mol_type = other RNA
gccgaaaggcgaagacgcggcaccgagtcggtgc

SEQ ID NO: 6898 - RNA, 34 nt, synthetic construct
  source 1..34: mol_type = other RNA
cacgaaagtgagggacgcggcaccgagtcggtgc

SEQ ID NO: 6899 - RNA, 34 nt, synthetic construct
  source 1..34: mol_type = other RNA
ggcgaaagcctactacgcggcaccgagtcggtgc

SEQ ID NO: 6900 - RNA, 34 nt, synthetic construct
  source 1..34: mol_type = other RNA
tcagaaatgacctgacgcggcaccgagtcggtgc

SEQ ID NO: 6901 - RNA, 34 nt, synthetic construct
  source 1..34: mol_type = other RNA
tcggaaacgagctaacgcggcaccgagtcggtgc

SEQ ID NO: 6902 - RNA, 34 nt, synthetic construct
  source 1..34: mol_type = other RNA
ccagaaatgggtgcacgcggcaccgagtcggtgc

SEQ ID NO: 6903 - RNA, 35 nt, synthetic construct
  source 1..35: mol_type = other RNA
cttgaaagagtgggaacgcggcaccgagtcggtgc

SEQ ID NO: 6904 - RNA, 35 nt, synthetic construct
  source 1..35: mol_type = other RNA
cccgaaagggggatgacgcggcaccgagtcggtgc

SEQ ID NO: 6905 - RNA, 35 nt, synthetic construct
  source 1..35: mol_type = other RNA
ggagaaatccctgcaacgcggcaccgagtcggtgc

SEQ ID NO: 6906 - RNA, 35 nt, synthetic construct
  source 1..35: mol_type = other RNA
aaggaaatttggcggacgcggcaccgagtcggtgc

SEQ ID NO: 6907 - RNA, 35 nt, synthetic construct
  source 1..35: mol_type = other RNA
gccgaaaggccccgaacgcggcaccgagtcggtgc

SEQ ID NO: 6908 - RNA, 35 nt, synthetic construct
  source 1..35: mol_type = other RNA
tgggaaactacctgaacgcggcaccgagtcggtgc

SEQ ID NO: 6909 - RNA, 35 nt, synthetic construct
  source 1..35: mol_type = other RNA
ctggaaacgggtgcgacgcggcaccgagtcggtgc

SEQ ID NO: 6910 - RNA, 35 nt, synthetic construct
  source 1..35: mol_type = other RNA
cgggaaactgtagagacgcggcaccgagtcggtgc

SEQ ID NO: 6911 - RNA, 35 nt, synthetic construct
  source 1..35: mol_type = other RNA
tctgaaaaggcggcgacgcggcaccgagtcggtgc

SEQ ID NO: 6912 - RNA, 35 nt, synthetic construct
  source 1..35: mol_type = other RNA
gatgaaaatcccgtaacgcggcaccgagtcggtgc

SEQ ID NO: 6913 - RNA, 35 nt, synthetic construct
  source 1..35: mol_type = other RNA
ccggaaacggcagctacgcggcaccgagtcggtgc

SEQ ID NO: 6914 - RNA, 35 nt, synthetic construct
  source 1..35: mol_type = other RNA
tctgaaaaggccagtacgcggcaccgagtcggtgc

SEQ ID NO: 6915 - RNA, 35 nt, synthetic construct
  source 1..35: mol_type = other RNA
gcagaaatgtcagcgacgcggcaccgagtcggtgc

SEQ ID NO: 6916 - RNA, 35 nt, synthetic construct
  source 1..35: mol_type = other RNA
cctgaaaaggacaggacgcggcaccgagtcggtgc

SEQ ID NO: 6917 - RNA, 35 nt, synthetic construct
  source 1..35: mol_type = other RNA
gaggaaactcggtatacgcggcaccgagtcggtgc

SEQ ID NO: 6918 - RNA, 35 nt, synthetic construct
  source 1..35: mol_type = other RNA
cgcgaaagcgacctaacgcggcaccgagtcggtgc

SEQ ID NO: 6919 - RNA, 35 nt, synthetic construct
  source 1..35: mol_type = other RNA
aacgaaagtttcggcacgcggcaccgagtcggtgc

SEQ ID NO: 6920 - RNA, 35 nt, synthetic construct
  source 1..35: mol_type = other RNA
aaagaaatttgccgtacgcggcaccgagtcggtgc

SEQ ID NO: 6921 - RNA, 35 nt, synthetic construct
  source 1..35: mol_type = other RNA
cctgaaaaggctcatacgcggcaccgagtcggtgc

SEQ ID NO: 6922 - RNA, 35 nt, synthetic construct
  source 1..35: mol_type = other RNA
aaagaaattttgccgacgcggcaccgagtcggtgc

SEQ ID NO: 6923 - RNA, 35 nt, synthetic construct
  source 1..35: mol_type = other RNA
agcgaaagttagcggacgcggcaccgagtcggtgc

SEQ ID NO: 6924 - RNA, 35 nt, synthetic construct
  source 1..35: mol_type = other RNA
atcgaaagatggtggacgcggcaccgagtcggtgc

SEQ ID NO: 6925 - RNA, 35 nt, synthetic construct
  source 1..35: mol_type = other RNA
tgggaaaccgggactacgcggcaccgagtcggtgc

SEQ ID NO: 6926 - RNA, 35 nt, synthetic construct
  source 1..35: mol_type = other RNA
tacgaaagtaatgcgacgcggcaccgagtcggtgc

SEQ ID NO: 6927 - RNA, 35 nt, synthetic construct
  source 1..35: mol_type = other RNA
cacgaaagtgtcatcacgcggcaccgagtcggtgc

SEQ ID NO: 6928 - RNA, 69 nt, synthetic construct
  source 1..69: mol_type = other RNA
cccggaaacgggcaagtttaaataaggctagtccgttatcaacttgaaaaagtggcaccgagtcggtgc

SEQ ID NO: 6929 - RNA, 69 nt, synthetic construct
  source 1..69: mol_type = other RNA
ccccgaaaggggcaagtttaaataaggctagtccgttatcaacttgaaaaagtggcaccgagtcggtgc

SEQ ID NO: 6930 - RNA, 69 nt, synthetic construct
  source 1..69: mol_type = other RNA
ccgggaaaccggcaagtttaaataaggctagtccgttatcaacttgaaaaagtggcaccgagtcggtgc

SEQ ID NO: 6931 - RNA, 69 nt, synthetic construct
  source 1..69: mol_type = other RNA
ccgcgaaagcggcaagtttaaataaggctagtccgttatcaacttgaaaaagtggcaccgagtcggtgc

SEQ ID NO: 6932 - RNA, 69 nt, synthetic construct
  source 1..69: mol_type = other RNA
cggcgaaagccgcaagtttaaataaggctagtccgttatcaacttgaaaaagtggcaccgagtcggtgc

SEQ ID NO: 6933 - RNA, 69 nt, synthetic construct
  source 1..69: mol_type = other RNA
cgccgaaaggcgcaagtttaaataaggctagtccgttatcaacttgaaaaagtggcaccgagtcggtgc

SEQ ID NO: 6934 - RNA, 69 nt, synthetic construct
  source 1..69: mol_type = other RNA
cgcggaaacgcgcaagtttaaataaggctagtccgttatcaacttgaaaaagtggcaccgagtcggtgc

SEQ ID NO: 6935 - RNA, 69 nt, synthetic construct
  source 1..69: mol_type = other RNA
cggggaaacccgcaagtttaaataaggctagtccgttatcaacttgaaaaagtggcaccgagtcggtgc

SEQ ID NO: 6936 - RNA, 69 nt, synthetic construct
  source 1..69: mol_type = other RNA
cctggaaacaggcaagtttaaataaggctagtccgttatcaacttgaaaaagtggcaccgagtcggtgc

SEQ ID NO: 6937 - RNA, 69 nt, synthetic construct
  source 1..69: mol_type = other RNA
cgaggaaactcgcaagtttaaataaggctagtccgttatcaacttgaaaaagtggcaccgagtcggtgc

SEQ ID NO: 6938 - RNA, 69 nt, synthetic construct
  source 1..69: mol_type = other RNA
cgtcgaaagacgcaagtttaaataaggctagtccgttatcaacttgaaaaagtggcaccgagtcggtgc

SEQ ID NO: 6939 - RNA, 69 nt, synthetic construct
  source 1..69: mol_type = other RNA
cagcgaaagctgcaagtttaaataaggctagtccgttatcaacttgaaaaagtggcaccgagtcggtgc

SEQ ID NO: 6940 - RNA, 69 nt, synthetic construct
  source 1..69: mol_type = other RNA
ccgtgaaaacggcaagtttaaataaggctagtccgttatcaacttgaaaaagtggcaccgagtcggtgc

SEQ ID NO: 6941 - RNA, 69 nt, synthetic construct
  source 1..69: mol_type = other RNA
ctgggaaaccagcaagtttaaataaggctagtccgttatcaacttgaaaaagtggcaccgagtcggtgc

SEQ ID NO: 6942 - RNA, 69 nt, synthetic construct
  source 1..69: mol_type = other RNA
ccctgaaaagggcaagtttaaataaggctagtccgttatcaacttgaaaaagtggcaccgagtcggtgc

SEQ ID NO: 6943 - RNA, 69 nt, synthetic construct
  source 1..69: mol_type = other RNA
cgacgaaagtcgcaagtttaaataaggctagtccgttatcaacttgaaaaagtggcaccgagtcggtgc

SEQ ID NO: 6944 - RNA, 69 nt, synthetic construct
  source 1..69: mol_type = other RNA
cggagaaatccgcaagtttaaataaggctagtccgttatcaacttgaaaaagtggcaccgagtcggtgc

SEQ ID NO: 6945 - RNA, 69 nt, synthetic construct
  source 1..69: mol_type = other RNA
caccgaaaggtgcaagtttaaataaggctagtccgttatcaacttgaaaaagtggcaccgagtcggtgc

SEQ ID NO: 6946 - RNA, 69 nt, synthetic construct
  source 1..69: mol_type = other RNA
cagggaaacctgcaagtttaaataaggctagtccgttatcaacttgaaaaagtggcaccgagtcggtgc

SEQ ID NO: 6947 - RNA, 69 nt, synthetic construct
  source 1..69: mol_type = other RNA
cggggaaatccgcaagtttaaataaggctagtccgttatcaacttgaaaaagtggcaccgagtcggtgc

SEQ ID NO: 6948 - RNA, 69 nt, synthetic construct
  source 1..69: mol_type = other RNA
cggggaaatccgcaagtttaaataaggctagtccgttatcagcgtgaaaacgcggcaccgagtcggtgc

SEQ ID NO: 6949 - RNA, 69 nt, synthetic construct
  source 1..69: mol_type = other RNA
cctcgaaaggggcaagtttaaataaggctagtccgttatcaacttgaaaaagtggcaccgagtcggtgc

SEQ ID NO: 6950 - RNA, 69 nt, synthetic construct
  source 1..69: mol_type = other RNA
ctgcgaaagcagcaagtttaaataaggctagtccgttatcaacttgaaaaagtggcaccgagtcggtgc

SEQ ID NO: 6951 - RNA, 69 nt, synthetic construct
  source 1..69: mol_type = other RNA
cacggaaacgtgcaagtttaaataaggctagtccgttatcaacttgaaaaagtggcaccgagtcggtgc

SEQ ID NO: 6952 - RNA, 69 nt, synthetic construct
  source 1..69: mol_type = other RNA
cgtggaaacacgcaagtttaaataaggctagtccgttatcaacttgaaaaagtggcaccgagtcggtgc

SEQ ID NO: 6953 - RNA, 69 nt, synthetic construct
  source 1..69: mol_type = other RNA
ctccgaaaggggcaagtttaaataaggctagtccgttatcaacttgaaaaagtggcaccgagtcggtgc

SEQ ID NO: 6954 - RNA, 70 nt, synthetic construct
  source 1..70: mol_type = other RNA
caccgaaaggtggcaagtttaaataaggctagtccgttatcaacttgaaaaagtggcaccgagtcggtgc

SEQ ID NO: 6955 - RNA, 70 nt, synthetic construct
  source 1..70: mol_type = other RNA
cgtcgaaagacggcaagtttaaataaggctagtccgttatcaacttgaaaaagtggcaccgagtcggtgc

SEQ ID NO: 6956 - RNA, 70 nt, synthetic construct
  source 1..70: mol_type = other RNA
cagcgaaagctggcaagtttaaataaggctagtccgttatcaacttgaaaaagtggcaccgagtcggtgc

SEQ ID NO: 6957 - RNA, 70 nt, synthetic construct
  source 1..70: mol_type = other RNA
gcgggaaaccgcgcaagtttaaataaggctagtccgttatcaacttgaaaaagtggcaccgagtcggtgc

SEQ ID NO: 6958 - RNA, 70 nt, synthetic construct
  source 1..70: mol_type = other RNA
tcgcgaaagcgagcaagtttaaataaggctagtccgttatcaacttgaaaaagtggcaccgagtcggtgc

SEQ ID NO: 6959 - RNA, 70 nt, synthetic construct
  source 1..70: mol_type = other RNA
tcgggaaaccgagcaagtttaaataaggctagtccgttatcaacttgaaaaagtggcaccgagtcggtgc

SEQ ID NO: 6960 - RNA, 70 nt, synthetic construct
  source 1..70: mol_type = other RNA
ccctgaaagggggcaagtttaaataaggctagtccgttatcaacttgaaaaagtggcaccgagtcggtgc

SEQ ID NO: 6961 - RNA, 70 nt, synthetic construct
  source 1..70: mol_type = other RNA
cgtggaaacgcggcaagtttaaataaggctagtccgttatcaacttgaaaaagtggcaccgagtcggtgc

SEQ ID NO: 6962 - RNA, 70 nt, synthetic construct
  source 1..70: mol_type = other RNA
gaccgaaaggtcgcaagtttaaataaggctagtccgttatcaacttgaaaaagtggcaccgagtcggtgc

SEQ ID NO: 6963 - RNA, 70 nt, synthetic construct
  source 1..70: mol_type = other RNA
acgcgaaagcgtgcaagtttaaataaggctagtccgttatcaacttgaaaaagtggcaccgagtcggtgc

SEQ ID NO: 6964 - RNA, 70 nt, synthetic construct
  source 1..70: mol_type = other RNA
gagcgaaagctcgcaagtttaaataaggctagtccgttatcaacttgaaaaagtggcaccgagtcggtgc

SEQ ID NO: 6965 - RNA, 70 nt, synthetic construct
  source 1..70: mol_type = other RNA
tccggaaacggagcaagtttaaataaggctagtccgttatcaacttgaaaaagtggcaccgagtcggtgc

SEQ ID NO: 6966 - RNA, 70 nt, synthetic construct
  source 1..70: mol_type = other RNA
gccagaaatggcgcaagtttaaataaggctagtccgttatcaacttgaaaaagtggcaccgagtcggtgc

SEQ ID NO: 6967 - RNA, 70 nt, synthetic construct
  source 1..70: mol_type = other RNA
ccgtgaaaacgggcaagtttaaataaggctagtccgttatcaacttgaaaaagtggcaccgagtcggtgc

SEQ ID NO: 6968 - RNA, 70 nt, synthetic construct
  source 1..70: mol_type = other RNA
gtgcgaaagcacgcaagtttaaataaggctagtccgttatcaacttgaaaaagtggcaccgagtcggtgc

SEQ ID NO: 6969 - RNA, 70 nt, synthetic construct
  source 1..70: mol_type = other RNA
tgccgaaaggcggcaagtttaaataaggctagtccgttatcaacttgaaaaagtggcaccgagtcggtgc

SEQ ID NO: 6970 - RNA, 70 nt, synthetic construct
  source 1..70: mol_type = other RNA
cctggaaacagggcaagtttaaataaggctagtccgttatcaacttgaaaaagtggcaccgagtcggtgc

SEQ ID NO: 6971 - RNA, 70 nt, synthetic construct
  source 1..70: mol_type = other RNA
gctcgaaagggcgcaagtttaaataaggctagtccgttatcaacttgaaaaagtggcaccgagtcggtgc

SEQ ID NO: 6972 - RNA, 70 nt, synthetic construct
  source 1..70: mol_type = other RNA
gcccgaaagggtgcaagtttaaataaggctagtccgttatcaacttgaaaaagtggcaccgagtcggtgc

SEQ ID NO: 6973 - RNA, 70 nt, synthetic construct
  source 1..70: mol_type = other RNA
tggggaaacccggcaagtttaaataaggctagtccgttatcaacttgaaaaagtggcaccgagtcggtgc

SEQ ID NO: 6974 - RNA, 70 nt, synthetic construct
  source 1..70: mol_type = other RNA
ggtcgaaaggccgcaagtttaaataaggctagtccgttatcaacttgaaaaagtggcaccgagtcggtgc

SEQ ID NO: 6975 - RNA, 70 nt, synthetic construct
  source 1..70: mol_type = other RNA
aggcgaaagcctgcaagtttaaataaggctagtccgttatcaacttgaaaaagtggcaccgagtcggtgc

SEQ ID NO: 6976 - RNA, 70 nt, synthetic construct
  source 1..70: mol_type = other RNA
gtgggaaaccgcgcaagtttaaataaggctagtccgttatcaacttgaaaaagtggcaccgagtcggtgc

SEQ ID NO: 6977 - RNA, 70 nt, synthetic construct
  source 1..70: mol_type = other RNA
gctggaaacagcgcaagtttaaataaggctagtccgttatcaacttgaaaaagtggcaccgagtcggtgc

SEQ ID NO: 6978 - RNA, 70 nt, synthetic construct
  source 1..70: mol_type = other RNA
ctgggaaaccaggcaagtttaaataaggctagtccgttatcaacttgaaaaagtggcaccgagtcggtgc

SEQ ID NO: 6979 - RNA, 70 nt, synthetic construct
  source 1..70: mol_type = other RNA
cgcagaaatgcggcaagtttaaataaggctagtccgttatcaacttgaaaaagtggcaccgagtcggtgc

SEQ ID NO: 6980 - RNA, 70 nt, synthetic construct
  source 1..70: mol_type = other RNA
ccgggaaaccgggcaagtttaaataaggctagtccgttatcaacttgaaaaagtggcaccgagtcggtgc

SEQ ID NO: 6981 - RNA, 70 nt, synthetic construct
  source 1..70: mol_type = other RNA
ccgcgaaagcgggcaagtttaaataaggctagtccgttatcaacttgaaaaagtggcaccgagtcggtgc

SEQ ID NO: 6982 - RNA, 70 nt, synthetic construct
  source 1..70: mol_type = other RNA
agccgaaaggctgcaagtttaaataaggctagtccgttatcaacttgaaaaagtggcaccgagtcggtgc

SEQ ID NO: 6983 - RNA, 70 nt, synthetic construct
  source 1..70: mol_type = other RNA
tgccgaaaggcagcaagtttaaataaggctagtccgttatcaacttgaaaaagtggcaccgagtcggtgc

SEQ ID NO: 6984 - RNA, 70 nt, synthetic construct
  source 1..70: mol_type = other RNA
ggacgaaagtccgcaagtttaaataaggctagtccgttatcaacttgaaaaagtggcaccgagtcggtgc

SEQ ID NO: 6985 - RNA, 70 nt, synthetic construct
  source 1..70: mol_type = other RNA
ccaggaaactgggcaagtttaaataaggctagtccgttatcaacttgaaaaagtggcaccgagtcggtgc

SEQ ID NO: 6986 - RNA, 82 nt, synthetic construct; identical to SEQ ID NO: 4324
  source 1..82: mol_type = other RNA

SEQ ID NO: 6987 - RNA, 71 nt, synthetic construct
  source 1..71: mol_type = other RNA
tcccgaaaggggggcaagtttaaataaggctagtccgttatcaacttgaaaaagtggcaccgagtcggtgc

SEQ ID NO: 6988 - RNA, 82 nt, synthetic construct; identical to SEQ ID NO: 4326
  source 1..82: mol_type = other RNA

SEQ ID NO: 6989 - RNA, 82 nt, synthetic construct; identical to SEQ ID NO: 4327
  source 1..82: mol_type = other RNA

SEQ ID NO: 6990 - RNA, 71 nt, synthetic construct
  source 1..71: mol_type = other RNA
ctgagaaatcagggcaagtttaaataaggctagtccgttatcaacttgaaaaagtggcaccgagtcggtgc

SEQ ID NO: 6991 - RNA, 71 nt, synthetic construct
  source 1..71: mol_type = other RNA
tccagaaatggaggcaagtttaaataaggctagtccgttatcaacttgaaaaagtggcaccgagtcggtgc

SEQ ID NO: 6992 - RNA, 82 nt, synthetic construct; identical to SEQ ID NO: 4330
  source 1..82: mol_type = other RNA

SEQ ID NO: 6993 - RNA, 82 nt, synthetic construct; identical to SEQ ID NO: 4331
  source 1..82: mol_type = other RNA

SEQ ID NO: 6994 - RNA, 82 nt, synthetic construct; identical to SEQ ID NO: 4332
  source 1..82: mol_type = other RNA

SEQ ID NO: 6995 - RNA, 71 nt, synthetic construct
  source 1..71: mol_type = other RNA
cggggaaactcgggcaagtttaaataaggctagtccgttatcaacttgaaaaagtggcaccgagtcggtgc

SEQ ID NO: 6996 - RNA, 82 nt, synthetic construct; identical to SEQ ID NO: 4334
  source 1..82: mol_type = other RNA

SEQ ID NO: 6997 - RNA, 82 nt, synthetic construct; identical to SEQ ID NO: 4335
  source 1..82: mol_type = other RNA

SEQ ID NO: 6998 - RNA, 71 nt, synthetic construct
  source 1..71: mol_type = other RNA
gcccgaaagggcggcaagtttaaataaggctagtccgttatcaacttgaaaaagtggcaccgagtcggtgc

SEQ ID NO: 6999 - RNA, 71 nt, synthetic construct
  source 1..71: mol_type = other RNA
ccgcgaaagcggggcaagtttaaataaggctagtccgttatcaacttgaaaaagtggcaccgagtcggtgc

SEQ ID NO: 7000 - RNA, 82 nt, synthetic construct; identical to SEQ ID NO: 4338
  source 1..82: mol_type = other RNA

SEQ ID NO: 7001 - RNA, 82 nt, synthetic construct; identical to SEQ ID NO: 4339
  source 1..82: mol_type = other RNA

SEQ ID NO: 7002 - RNA, 82 nt, synthetic construct; identical to SEQ ID NO: 4340
  source 1..82: mol_type = other RNA

SEQ ID NO: 7003 - RNA, 71 nt, synthetic construct
  source 1..71: mol_type = other RNA
cgcggaaacgcgggcaagtttaaataaggctagtccgttatcaacttgaaaaagtggcaccgagtcggtgc

SEQ ID NO: 7004 - RNA, 71 nt, synthetic construct
  source 1..71: mol_type = other RNA
ggccgaaaggccggcaagtttaaataaggctagtccgttatcaacttgaaaaagtggcaccgagtcggtgc

SEQ ID NO: 7005 - RNA, 71 nt, synthetic construct
  source 1..71: mol_type = other RNA
catggaaacatgggcaagtttaaataaggctagtccgttatcaacttgaaaaagtggcaccgagtcggtgc

SEQ ID NO: 7006 - RNA, 82 nt, synthetic construct; identical to SEQ ID NO: 4344
  source 1..82: mol_type = other RNA

SEQ ID NO: 7007 - RNA, 82 nt, synthetic construct; identical to SEQ ID NO: 4345
  source 1..82: mol_type = other RNA

SEQ ID NO: 7008 - RNA, 82 nt, synthetic construct; identical to SEQ ID NO: 4346
  source 1..82: mol_type = other RNA

SEQ ID NO: 7009 - RNA, 71 nt, synthetic construct
  source 1..71: mol_type = other RNA
cgaggaaactcgggcaagtttaaataaggctagtccgttatcaacttgaaaaagtggcaccgagtcggtgc

SEQ ID NO: 7010 - RNA, 71 nt, synthetic construct
  source 1..71: mol_type = other RNA
gcaggaaactgcggcaagtttaaataaggctagtccgttatcaacttgaaaaagtggcaccgagtcggtgc

SEQ ID NO: 7011 - RNA, 82 nt, synthetic construct; identical to SEQ ID NO: 4349
  source 1..82: mol_type = other RNA

SEQ ID NO: 7012 - RNA, 76 nt, synthetic construct; identical to SEQ ID NO: 16
  source 1..76: mol_type = other RNA

SEQ ID NO: 7013 - RNA, 78 nt, synthetic construct; identical to SEQ ID NO: 4351
  source 1..78: mol_type = other RNA

SEQ ID NO: 7014 - RNA, 78 nt, synthetic construct; identical to SEQ ID NO: 4266
  source 1..78: mol_type = other RNA

SEQ ID NO: 7015 - RNA, 76 nt, synthetic construct; identical to SEQ ID NO: 20
  source 1..76: mol_type = other RNA

SEQ ID NO: 7016 - RNA, 86 nt, synthetic construct; identical to SEQ ID NO: 24
  source 1..86: mol_type = other RNA

SEQ ID NO: 7017 - RNA, 76 nt, synthetic construct; identical to SEQ ID NO: 25
  source 1..76: mol_type = other RNA

SEQ ID NO: 7018 - RNA, 86 nt, synthetic construct; identical to SEQ ID NO: 4356
  source 1..86: mol_type = other RNA

SEQ ID NO: 7019 - RNA, 76 nt, synthetic construct; identical to SEQ ID NO: 4357
  source 1..76: mol_type = other RNA

SEQ ID NO: 7020 - RNA, 76 nt, synthetic construct; identical to SEQ ID NO: 4358
  source 1..76: mol_type = other RNA

SEQ ID NO: 7021 - RNA, 76 nt, synthetic construct; identical to SEQ ID NO: 4359
  source 1..76: mol_type = other RNA

SEQ ID NO: 7022 - protein, 503 aa, synthetic construct
TLNIEDEYRLHETSKEPDVSLGSTWLSDFPQAWAETGGMGLAVRQAPLIIPLKATSTPVSIKQYPMSQEARLGIKPHIQRLLDQGILVPCQSPWNTPLLPVKKPGTNDYRPVQDLREVNKRVEDIHPTVPNPYNLLSGLPPSHQWYTVLDLKDAFFCLRLHPTSQPLFAFEWRDPEMGISGQLTWTRLPQGFKNSPTLFNEALHRDLADFRIQHPDLILLQYVDDLLLAATSELDCQQGTRALLQTLGNLGYRASAKKAQICQKQVKYLGYLLKEGQRWLTEARKETVMGQPTPKTPRQLREFLGKAGFCRLFIPGFAEMAAPLYPLTKPGTLFNWGPDQQKAYQEIKQALLTAPALGLPDLTKPFELFVDEKQGYAKGVLTQKLGPWRRPVAYLSKKLDPVAAGWPPCLRMVAAIAVLTKDAGKLTMGQPLVILAPHAVEALVKQPPDRWLSNARMTHYQALLLDTDRVQFGPVVALNPATLLPLPEEGLQHNCLDNSRLIN

SEQ ID NO: 7023 - protein, 30 aa, synthetic construct
MDSLLMNRRKFLYQFKNVRWAKGRRETYLC

SEQ ID NO: 7024 - protein, 18 aa, synthetic construct
KRTADGSEFESPKKKRKV

SEQ ID NO: 7025 - protein, 17 aa, synthetic construct
KRTADGSEFEPKKKRKV

SEQ ID NO: 7026 - protein, 19 aa, synthetic construct
NLSKRPAAIKKAGQAKKKK

SEQ ID NO: 7027 - protein, 11 aa, synthetic construct
RQRRNELKRSF

SEQ ID NO: 7028 - protein, 38 aa, synthetic construct
NQSSNFGPMKGGNFGGRSSGPYGGGGQYFAKPRNQGGY

SEQ ID NO: 7029 - protein, 7 aa, synthetic construct
PKKKRKV

SEQ ID NO: 7030 - protein, 19 aa, synthetic construct
MKRTADGSEFESPKKKRKV

SEQ ID NO: 7031 - protein, 20 aa, synthetic construct
AVKRPAATKKAGQAKKKKLD

SEQ ID NO: 7032 - protein, 25 aa, synthetic construct
MSRRRKANPTKLSENAKKLAKEVEN

SEQ ID NO: 7033 - protein, 9 aa, synthetic construct
PAAKRVKLD

SEQ ID NO: 7034 - protein, 9 aa, synthetic construct
KLKIKRPVK

SEQ ID NO: 7035 - protein, 8 aa, synthetic construct
VSRKRPRP

SEQ ID NO: 7036 - protein, 10 aa, synthetic construct
EGAPPAKRAR

SEQ ID NO: 7037 - protein, 12 aa, synthetic construct
PPQPKKKPLDGE

SEQ ID NO: 7038 - protein, 21 aa, synthetic construct
SGGSKRTADGSEFEPKKKRKV

SEQ ID NO: 7039 - protein, 150 aa, synthetic construct
  VARIANT 5..150: note = GGGGS repeats may be deleted
GGGGSGGGGSGGGGSGGGGSGGGGSGGGGSGGGGSGGGGSGGGGSGGGGSGGGGSGGGGSGGGGSGGGGSGGGGSGGGGSGGGGSGGGGSGGGGSGGGGSGGGGSGGGGSGGGGSGGGGSGGGGSGGGGSGGGGSGGGGSGGGGSGGGGS

SEQ ID NO: 7040 - protein, 30 aa, synthetic construct
  VARIANT 2..30: note = Residues may be deleted
GGGGGGGGGGGGGGGGGGGGGGGGGGGGGG

SEQ ID NO: 7041 - protein, 150 aa, synthetic construct
  VARIANT 6..150: note = EAAAK repeats may be deleted
EAAAKEAAAKEAAAKEAAAKEAAAKEAAAKEAAAKEAAAKEAAAKEAAAKEAAAKEAAAKEAAAKEAAAKEAAAKEAAAKEAAAKEAAAKEAAAKEAAAKEAAAKEAAAKEAAAKEAAAKEAAAKEAAAKEAAAKEAAAKEAAAKEAAAK

SEQ ID NO: 7042 - protein, 90 aa, synthetic construct
  VARIANT 4..90: note = GGS repeats may be deleted
GGSGGSGGSGGSGGSGGSGGSGGSGGSGGSGGSGGSGGSGGSGGSGGSGGSGGSGGSGGSGGSGGSGGSGGSGGSGGSGGSGGSGGSGGS

SEQ ID NO: 7043 - protein, 120 aa, synthetic construct
  VARIANT 5..120: note = SGGS repeats may be deleted
SGGSSGGSSGGSSGGSSGGSSGGSSGGSSGGSSGGSSGGSSGGSSGGSSGGSSGGSSGGSSGGSSGGSSGGSSGGSSGGSSGGSSGGSSGGSSGGSSGGSSGGSSGGSSGGSSGGSSGGS

SEQ ID NO: 7044 - protein, 60 aa, synthetic construct
  VARIANT 3..60: note = XP repeats may be deleted and wherein X can be any amino acid
XPXPXPXPXPXPXPXPXPXPXPXPXPXPXPXPXPXPXPXPXPXPXPXPXPXPXPXPXPXP

SEQ ID NO: 7045 - protein, 21 aa, synthetic construct
  VARIANT 4..21: note = 6 or 4 GGS repeats may be deleted
GGSGGSGGSGGSGGSGGSGGS

SEQ ID NO: 7046 - protein, 16 aa, synthetic construct
SGSETPGTSESATPES

SEQ ID NO: 7047 - protein, 32 aa, synthetic construct
SGGSSGGSSGSETPGTSESATPESSGGSSGGS

SEQ ID NO: 7048 - protein, 10 aa, synthetic construct
SGGSGGSGGS

SEQ ID NO: 7049 - protein, 4 aa, synthetic construct
SGGS

SEQ ID NO: 7050 - protein, 60 aa, synthetic construct
SGGSSGGSSGSETPGTSESATPESAGSYPYDVPDYAGSAAPAAKKKKLDGSGSGGSSGGS

SEQ ID NO: 7051 - protein, 6 aa, synthetic construct
GGSGGS

SEQ ID NO: 7052 - protein, 9 aa, synthetic construct
GGSGGSGGS

SEQ ID NO: 7053 - protein, 33 aa, synthetic construct; identical to SEQ ID NO: 4443

SEQ ID NO: 7054 - DNA, 43 bp, synthetic construct
  source 1..43: mol_type = other DNA
cgatttcttggctttatatatcttgtggaaaggacgaaacacc

SEQ ID NO: 7055 - DNA, 59 bp, synthetic construct
  source 1..59: mol_type = other DNA
ttattacagggacagcagagatccagtttatcgatnnnnnnatcgcggtacgccaagct

SEQ ID NO: 7056 - DNA, 57 bp, synthetic construct
  source 1..57: mol_type = other DNA
acactctttccctacacgacgctcttccgatctnncttgtggaaaggacgaaacacc

SEQ ID NO: 7057 - DNA, 58 bp, synthetic construct
  source 1..58: mol_type = other DNA
acactctttccctacacgacgctcttccgatctnnncttgtggaaaggacgaaacacc

SEQ ID NO: 7058 - DNA, 59 bp, synthetic construct
  source 1..59: mol_type = other DNA
acactctttccctacacgacgctcttccgatctnnnncttgtggaaaggacgaaacacc

SEQ ID NO: 7059 - DNA, 60 bp, synthetic construct
  source 1..60: mol_type = other DNA
acactctttccctacacgacgctcttccgatctnnnnncttgtggaaaggacgaaacacc

SEQ ID NO: 7060 - DNA, 56 bp, synthetic construct
  source 1..56: mol_type = other DNA
tggagttcagacgtgtgctcttccgatctnggacagcagagatccagtttatcgat

SEQ ID NO: 7061 - DNA, 57 bp, synthetic construct
  source 1..57: mol_type = other DNA
tggagttcagacgtgtgctcttccgatctnnggacagcagagatccagtttatcgat

SEQ ID NO: 7062 - DNA, 58 bp, synthetic construct
  source 1..58: mol_type = other DNA
tggagttcagacgtgtgctcttccgatctnnnggacagcagagatccagtttatcgat

SEQ ID NO: 7063 - DNA, 25 bp, synthetic construct
  source 1..25: mol_type = other DNA
tatcttgtggaaaggacgaaacacc

SEQ ID NO: 7064 - DNA, 229 bp, synthetic construct
  source 1..229: mol_type = other DNA
cttgtggaaaggacgaaacaccgnnnnnnnnnnnnnnnnnnnngtttagagacgnnnnnnnnnnnnnnncgtctcggtgcnnnnnnnnnnnnnnnnnnnnnnnnnnnnnnnnnnnnnnnnnnnnnnntttttttnnnnnnnnnnnnnnnnnnnnnnnnnnnnnnnnnnnnnnnnnnnnnnnnnnnnnnnnnnnnnnnnnnnnnnnnnnnncagcttggcgtaccgcgat

SEQ ID NO: 7065 - DNA, 21 bp, synthetic construct
  source 1..21: mol_type = other DNA
nnnatcgcggtacgccaagct

SEQ ID NO: 7066 - DNA, 46 bp, synthetic construct
  source 1..46: mol_type = other DNA
acacgacgctcttccgatctnnnncttgtggaaaggacgaaacacc

SEQ ID NO: 7067 - DNA, 287 bp, synthetic construct
  source 1..287: mol_type = other DNA
cgatttcttggctttatatatcttgtggaaaggacgaaacaccgnnnnnnnnnnnnnnnnnnnngtttagagacgnnnnnnnnnnnnnnncgtctcggtgcnnnnnnnnnnnnnnnnnnnnnnnnnnnnnnnnnnnnnnnnnnnntttttttnnnnnnnnnnnnnnnnnnnnnnnnnnnnnnnnnnnnnnnnnnnnnnnnnnnnnnnnnnnnnnnnnnnnnnnnnnnncagcttggcgtaccgcgatnnnnnntcgataaactggatctctgctgtccctgtaataa

SEQ ID NO: 7068 - DNA, 47 bp, synthetic construct
  source 1..47: mol_type = other DNA
tggagttcagacgtgtgctcttccgatctatcgcggtacgccaagct

SEQ ID NO: 7069 - DNA, 59 bp, synthetic construct; identical to SEQ ID NO: 7055
  source 1..59: mol_type = other DNA

SEQ ID NO: 7070 - RNA, 106 nt, synthetic construct
  source 1..106: mol_type = other RNA
nnnnnnnnnnnnnnnnnnnnntttannnnnnnnnnnnnnnnnnnnnnnnnnnnnntaaannnnnnnnnnnnnnnnnnnnnnnnnnnncncnnnnnnnnnnnnnnnn

SEQ ID NO: 7071 - RNA, 19 nt, synthetic construct
  source 1..19: mol_type = other RNA
tgggcagggcagggtggga
